United States Patent Application Publication US 2024/0033377 A1 - sequence listing, part 2

SEQ ID NO: 21107 - RNA, 20 nt, Artificial Sequence
  HTT spacer sequence CTCN PAM
gaccugccacguggagguca

SEQ ID NO: 21108 - RNA, 20 nt, Artificial Sequence
  HTT spacer sequence CTCN PAM
ugccagccgcugugccgggu

SEQ ID NO: 21109 - RNA, 20 nt, Artificial Sequence
  HTT spacer sequence CTCN PAM
cgugccagccgcugugccgg

SEQ ID NO: 21110 - RNA, 20 nt, Artificial Sequence
  HTT spacer sequence CTCN PAM
acagacagcucucgugccag

SEQ ID NO: 21111 - RNA, 20 nt, Artificial Sequence
  HTT spacer sequence CTCN PAM
ggcugaugucugcugaacac

SEQ ID NO: 21112 - RNA, 20 nt, Artificial Sequence
  HTT spacer sequence CTCN PAM
cccugacgcucuggcugaug

SEQ ID NO: 21113 - RNA, 20 nt, Artificial Sequence
  HTT spacer sequence CTCN PAM
aaaagcacacacaagcacag

SEQ ID NO: 21114 - RNA, 20 nt, Artificial Sequence
  HTT spacer sequence CTCN PAM
ugugugacugguguugcggg

SEQ ID NO: 21115 - RNA, 20 nt, Artificial Sequence
  HTT spacer sequence CTCN PAM
uccugggcugcucugcgcgc

SEQ ID NO: 21116 - RNA, 20 nt, Artificial Sequence
  HTT spacer sequence CTCN PAM
ugggcugcucugcgcgccug

SEQ ID NO: 21117 - RNA, 20 nt, Artificial Sequence
  HTT spacer sequence CTCN PAM
gcgcgccugccaggcucuuc

SEQ ID NO: 21118 - RNA, 20 nt, Artificial Sequence
  HTT spacer sequence CTCN PAM
uccagugccuucacccaaca

SEQ ID NO: 21119 - RNA, 20 nt, Artificial Sequence
  HTT spacer sequence CTCN PAM
aaaggcccgcguguugggug

SEQ ID NO: 21120 - RNA, 20 nt, Artificial Sequence
  HTT spacer sequence CTCN PAM
gaccuggccauggcggaaga

SEQ ID NO: 21121 - RNA, 20 nt, Artificial Sequence
  HTT spacer sequence CTCN PAM
accugcagcuccacagcuga

SEQ ID NO: 21122 - RNA, 20 nt, Artificial Sequence
  HTT spacer sequence CTCN PAM
acagcugacaggccgaucuc

SEQ ID NO: 21123 - RNA, 20 nt, Artificial Sequence
  HTT spacer sequence CTCN PAM
uggggcaagucacuuucucu

SEQ ID NO: 21124 - RNA, 20 nt, Artificial Sequence
  HTT spacer sequence CTCN PAM
cuccuagccuugugucuuca

SEQ ID NO: 21125 - RNA, 20 nt, Artificial Sequence
  HTT spacer sequence CTCN PAM
ccuagccuugugucuucauc

SEQ ID NO: 21126 - RNA, 20 nt, Artificial Sequence
  HTT spacer sequence CTCN PAM
uagccuugugucuucaucuc

SEQ ID NO: 21127 - RNA, 20 nt, Artificial Sequence
  HTT spacer sequence CTCN PAM
ccgguccuuguuagcgaaca

SEQ ID NO: 21128 - RNA, 20 nt, Artificial Sequence
  HTT spacer sequence CTCN PAM
gugccuguucgcuaacaagg

SEQ ID NO: 21129 - RNA, 20 nt, Artificial Sequence
  HTT spacer sequence CTCN PAM
ccaggccucagugccuguuc

SEQ ID NO: 21130 - RNA, 20 nt, Artificial Sequence
  HTT spacer sequence CTCN PAM
cccaucaggcagccguuugu

SEQ ID NO: 21131 - RNA, 20 nt, Artificial Sequence
  HTT spacer sequence CTCN PAM
uuaaaauauaaaguauaauu

SEQ ID NO: 21132 - RNA, 20 nt, Artificial Sequence
  HTT spacer sequence CTCN PAM
ugcuacuuuuggugcacacu

SEQ ID NO: 21133 - RNA, 20 nt, Artificial Sequence
  HTT spacer sequence CTCN PAM
gagggggaauuauuacacac

SEQ ID NO: 21134 - RNA, 20 nt, Artificial Sequence
  HTT spacer sequence CTCN PAM
gaguacuuacccauguugau

SEQ ID NO: 21135 - RNA, 20 nt, Artificial Sequence
  HTT spacer sequence CTCN PAM
ugguuucugaaaaaggugug

SEQ ID NO: 21136 - RNA, 20 nt, Artificial Sequence
  HTT spacer sequence CTCN PAM
uuuuuccauucacauacuuu

SEQ ID NO: 21137 - RNA, 20 nt, Artificial Sequence
  HTT spacer sequence CTCN PAM
augugucuguuagauuuaau

SEQ ID NO: 21138 - RNA, 20 nt, Artificial Sequence
  HTT spacer sequence CTCN PAM
cuaugugucuguuagauuua

SEQ ID NO: 21139 - RNA, 20 nt, Artificial Sequence
  HTT spacer sequence CTCN PAM
guaugcuauaauuuuuuuaa

SEQ ID NO: 21140 - RNA, 20 nt, Artificial Sequence
  HTT spacer sequence CTCN PAM
ugacagcaguguauuugaau

SEQ ID NO: 21141 - RNA, 20 nt, Artificial Sequence
  HTT spacer sequence CTCN PAM
cauuuuaauuucuuccuuga

SEQ ID NO: 21142 - RNA, 20 nt, Artificial Sequence
  HTT spacer sequence CTCN PAM
uuuucuugauuauacuuuug

SEQ ID NO: 21143 - RNA, 20 nt, Artificial Sequence
  HTT spacer sequence CTCN PAM
cucuuuuucuugauuauacu

SEQ ID NO: 21144 - RNA, 20 nt, Artificial Sequence
  HTT spacer sequence CTCN PAM
gcacuuugggaggcugaugc

SEQ ID NO: 21145 - RNA, 20 nt, Artificial Sequence
  HTT spacer sequence CTCN PAM
caaagugcugagauuacagg

SEQ ID NO: 21146 - RNA, 20 nt, Artificial Sequence
  HTT spacer sequence CTCN PAM
ugcaucagccucccaaagug

SEQ ID NO: 21147 - RNA, 20 nt, Artificial Sequence
  HTT spacer sequence CTCN PAM
aauuccugggcccaagugau

SEQ ID NO: 21148 - RNA, 20 nt, Artificial Sequence
  HTT spacer sequence CTCN PAM
acaaaaaaagaaaaagagga

SEQ ID NO: 21149 - RNA, 20 nt, Artificial Sequence
  HTT spacer sequence CTCN PAM
uuuucuuuuuuuguagagau

SEQ ID NO: 21150 - RNA, 20 nt, Artificial Sequence
  HTT spacer sequence CTCN PAM
uccucuuuuucuuuuuuugu

SEQ ID NO: 21151 - RNA, 20 nt, Artificial Sequence
  HTT spacer sequence CTCN PAM
aacuguacuuaggaccuguc

SEQ ID NO: 21152 - RNA, 20 nt, Artificial Sequence
  HTT spacer sequence CTCN PAM
ucuguauauugguuugggca

SEQ ID NO: 21153 - RNA, 20 nt, Artificial Sequence
  HTT spacer sequence CTCN PAM
aggagccaggcuauuggagc

SEQ ID NO: 21154 - RNA, 20 nt, Artificial Sequence
  HTT spacer sequence CTCN PAM
uggaggaaaacacuuagaac

SEQ ID NO: 21155 - RNA, 20 nt, Artificial Sequence
  HTT spacer sequence CTCN PAM
aauagccuggcuccuggagg

SEQ ID NO: 21156 - RNA, 20 nt, Artificial Sequence
  HTT spacer sequence CTCN PAM
gccacaaggccugcagugcc

SEQ ID NO: 21157 - RNA, 20 nt, Artificial Sequence
  HTT spacer sequence CTCN PAM
cagccauacuguuucacauu

SEQ ID NO: 21158 - RNA, 20 nt, Artificial Sequence
  HTT spacer sequence CTCN PAM
gccauacuguuucacauuca

SEQ ID NO: 21159 - RNA, 20 nt, Artificial Sequence
  HTT spacer sequence CTCN PAM
uaaguuacuuggugaggagg

SEQ ID NO: 21160 - RNA, 20 nt, Artificial Sequence
  HTT spacer sequence CTCN PAM
ccaaguaacuuacgaguuac

SEQ ID NO: 21161 - RNA, 20 nt, Artificial Sequence
  HTT spacer sequence CTCN PAM
ucaccaaguaacuuacgagu

SEQ ID NO: 21162 - RNA, 20 nt, Artificial Sequence
  HTT spacer sequence CTCN PAM
ccuccucaccaaguaacuua

SEQ ID NO: 21163 - RNA, 20 nt, Artificial Sequence
  HTT spacer sequence CTCN PAM
cgcugucccugugaaguccg

SEQ ID NO: 21164 - RNA, 20 nt, Artificial Sequence
  HTT spacer sequence CTCN PAM
gacuucacagggacagcgug

SEQ ID NO: 21165 - RNA, 20 nt, Artificial Sequence
  HTT spacer sequence CTCN PAM
ccccgcuguaaaaccgcagu

SEQ ID NO: 21166 - RNA, 20 nt, Artificial Sequence
  HTT spacer sequence CTCN PAM
cugggcaagacacucccccc

SEQ ID NO: 21167 - RNA, 20 nt, Artificial Sequence
  HTT spacer sequence CTCN PAM
uuccucacugggcaagacac

SEQ ID NO: 21168 - RNA, 20 nt, Artificial Sequence
  HTT spacer sequence CTCN PAM
gcuccuuccucacugggcaa

SEQ ID NO: 21169 - RNA, 20 nt, Artificial Sequence
  HTT spacer sequence CTCN PAM
gagucagauccaaacagugu

SEQ ID NO: 21170 - RNA, 20 nt, Artificial Sequence
  HTT spacer sequence CTCN PAM
gagcuccgcuccuuccucac

SEQ ID NO: 21171 - RNA, 20 nt, Artificial Sequence
  HTT spacer sequence CTCN PAM
ggaaccacgccgugaaccgg

SEQ ID NO: 21172 - RNA, 20 nt, Artificial Sequence
  HTT spacer sequence CTCN PAM
gccugguguuaccuagucca

SEQ ID NO: 21173 - RNA, 20 nt, Artificial Sequence
  HTT spacer sequence CTCN PAM
uagaauacagcuugccauag

SEQ ID NO: 21174 - RNA, 20 nt, Artificial Sequence
  HTT spacer sequence CTCN PAM
auggcaagcuguauucuagg

SEQ ID NO: 21175 - RNA, 20 nt, Artificial Sequence
  HTT spacer sequence CTCN PAM
cgauucacaggugcugacgg

SEQ ID NO: 21176 - RNA, 20 nt, Artificial Sequence
  HTT spacer sequence CTCN PAM
uucucacgauucacaggugc

SEQ ID NO: 21177 - RNA, 20 nt, Artificial Sequence
  HTT spacer sequence CTCN PAM
uuuaccgcaugcucaccuua

SEQ ID NO: 21178 - RNA, 20 nt, Artificial Sequence
  HTT spacer sequence CTCN PAM
ccuuaaacuugcccacccgg

SEQ ID NO: 21179 - RNA, 20 nt, Artificial Sequence
  HTT spacer sequence CTCN PAM
uccuaaaaccgggugggcaa

SEQ ID NO: 21180 - RNA, 20 nt, Artificial Sequence
  HTT spacer sequence CTCN PAM
auggggaacccagccauucu

SEQ ID NO: 21181 - RNA, 20 nt, Artificial Sequence
  HTT spacer sequence CTCN PAM
uccauggggaacccagccau

SEQ ID NO: 21182 - RNA, 20 nt, Artificial Sequence
  HTT spacer sequence CTCN PAM
ccuccauggggaacccagcc

SEQ ID NO: 21183 - RNA, 20 nt, Artificial Sequence
  HTT spacer sequence CTCN PAM
ucucuugcugcguaaaaguc

SEQ ID NO: 21184 - RNA, 20 nt, Artificial Sequence
  HTT spacer sequence CTCN PAM
ugcugcguaaaaguccaggg

SEQ ID NO: 21185 - RNA, 20 nt, Artificial Sequence
  HTT spacer sequence CTCN PAM
gcaaagcccuggacuuuuac

SEQ ID NO: 21186 - RNA, 20 nt, Artificial Sequence
  HTT spacer sequence CTCN PAM
ccacagucagcaaggagaag

SEQ ID NO: 21187 - RNA, 20 nt, Artificial Sequence
  HTT spacer sequence CTCN PAM
acagucagcaaggagaagca

SEQ ID NO: 21188 - RNA, 20 nt, Artificial Sequence
  HTT spacer sequence CTCN PAM
uugcugacuguggagaggcu

SEQ ID NO: 21189 - RNA, 20 nt, Artificial Sequence
  HTT spacer sequence CTCN PAM
agagguggcccccugagccc

SEQ ID NO: 21190 - RNA, 20 nt, Artificial Sequence
  HTT spacer sequence CTCN PAM
ggagacugcuucuccuugcu

SEQ ID NO: 21191 - RNA, 20 nt, Artificial Sequence
  HTT spacer sequence CTCN PAM
gggggccaccucuggagacu

SEQ ID NO: 21192 - RNA, 20 nt, Artificial Sequence
  HTT spacer sequence CTCN PAM
accccugggaaggggccaga

SEQ ID NO: 21193 - RNA, 20 nt, Artificial Sequence
  HTT spacer sequence CTCN PAM
agggccugcugccugugguc

SEQ ID NO: 21194 - RNA, 20 nt, Artificial Sequence
  HTT spacer sequence CTCN PAM
cgggcuccagggccugcugc

SEQ ID NO: 21195 - RNA, 20 nt, Artificial Sequence
  HTT spacer sequence CTCN PAM
cugggccaguggacauggga

SEQ ID NO: 21196 - RNA, 20 nt, Artificial Sequence
  HTT spacer sequence CTCN PAM
gccaugguggccauauaaau

SEQ ID NO: 21197 - RNA, 20 nt, Artificial Sequence
  HTT spacer sequence CTCN PAM
cagccaugguggccauauaa

SEQ ID NO: 21198 - RNA, 20 nt, Artificial Sequence
  HTT spacer sequence CTCN PAM
acacaucaggggcagauggu

SEQ ID NO: 21199 - RNA, 20 nt, Artificial Sequence
  HTT spacer sequence CTCN PAM
uuuuggcuuaugggguggcc

SEQ ID NO: 21200 - RNA, 20 nt, Artificial Sequence
  HTT spacer sequence CTCN PAM
aaaugucacaaauccuuuau

SEQ ID NO: 21201 - RNA, 20 nt, Artificial Sequence
  HTT spacer sequence CTCN PAM
ggcccuuccuccuucccuga

SEQ ID NO: 21202 - RNA, 20 nt, Artificial Sequence
  HTT spacer sequence CTCN PAM
uucccugaagccugguccuc

SEQ ID NO: 21203 - RNA, 20 nt, Artificial Sequence
  HTT spacer sequence CTCN PAM
ggccucaguccugcugggua

SEQ ID NO: 21204 - RNA, 20 nt, Artificial Sequence
  HTT spacer sequence CTCN PAM
guccugcuggguagggugcc

SEQ ID NO: 21205 - RNA, 20 nt, Artificial Sequence
  HTT spacer sequence CTCN PAM
cuaucccuggacucuuucag

SEQ ID NO: 21206 - RNA, 20 nt, Artificial Sequence
  HTT spacer sequence CTCN PAM
aucccuggacucuuucagug

SEQ ID NO: 21207 - RNA, 20 nt, Artificial Sequence
  HTT spacer sequence CTCN PAM
uucaguggaagcacaggucc

SEQ ID NO: 21208 - RNA, 20 nt, Artificial Sequence
  HTT spacer sequence CTCN PAM
agccaagguggggccaccca

SEQ ID NO: 21209 - RNA, 20 nt, Artificial Sequence
  HTT spacer sequence CTCN PAM
aaagugguccuaaacccuuc

SEQ ID NO: 21210 - RNA, 20 nt, Artificial Sequence
  HTT spacer sequence CTCN PAM
ugaggucagcauuuggggcc

SEQ ID NO: 21211 - RNA, 20 nt, Artificial Sequence
  HTT spacer sequence CTCN PAM
ugaggaagacucaaaagugg

SEQ ID NO: 21212 - RNA, 20 nt, Artificial Sequence
  HTT spacer sequence CTCN PAM
gcguuggguggcguccucug

SEQ ID NO: 21213 - RNA, 20 nt, Artificial Sequence
  HTT spacer sequence CTCN PAM
gcguugggugguguccucug

SEQ ID NO: 21214 - RNA, 20 nt, Artificial Sequence
  HTT spacer sequence CTCN PAM
gguggggccaagccacaacc

SEQ ID NO: 21215 - RNA, 20 nt, Artificial Sequence
  HTT spacer sequence CTCN PAM
uuuagugguuaauuccuuug

SEQ ID NO: 21216 - RNA, 20 nt, Artificial Sequence
  HTT spacer sequence CTCN PAM
aguaagcauaauaaaugaag

SEQ ID NO: 21217 - RNA, 20 nt, Artificial Sequence
  HTT spacer sequence CTCN PAM
aagaaaagacacagaacauu

SEQ ID NO: 21218 - RNA, 20 nt, Artificial Sequence
  HTT spacer sequence CTCN PAM
ggaugcuccaagaaaagaca

SEQ ID NO: 21219 - RNA, 20 nt, Artificial Sequence
  HTT spacer sequence CTCN PAM
cuguggucagaugugaccuc

SEQ ID NO: 21220 - RNA, 20 nt, Artificial Sequence
  HTT spacer sequence CTCN PAM
ccaacuacuuauggucauag

SEQ ID NO: 21221 - RNA, 20 nt, Artificial Sequence
  HTT spacer sequence CTCN PAM
aagccuagaauccuaaaaau

SEQ ID NO: 21222 - RNA, 20 nt, Artificial Sequence
  HTT spacer sequence CTCN PAM
gaauuuuuaggauucuaggc

SEQ ID NO: 21223 - RNA, 20 nt, Artificial Sequence
  HTT spacer sequence CTCN PAM
ucuuugcacaucgccuaaca

SEQ ID NO: 21224 - RNA, 20 nt, Artificial Sequence
  HTT spacer sequence CTCN PAM
ugcgaaggucagugugggaa

SEQ ID NO: 21225 - RNA, 20 nt, Artificial Sequence
  HTT spacer sequence CTCN PAM
gcucacucgcauggccucau

SEQ ID NO: 21226 - RNA, 20 nt, Artificial Sequence
  HTT spacer sequence CTCN PAM
cucgcauggccucaugggcu

SEQ ID NO: 21227 - RNA, 20 nt, Artificial Sequence
  HTT spacer sequence CTCN PAM
cauggccucaugggcucugg

SEQ ID NO: 21228 - RNA, 20 nt, Artificial Sequence
  HTT spacer sequence CTCN PAM
ugggcucuggcagcauuuca

SEQ ID NO: 21229 - RNA, 20 nt, Artificial Sequence
  HTT spacer sequence CTCN PAM
ggcagcauuucacccccgcc

SEQ ID NO: 21230 - RNA, 20 nt, Artificial Sequence
  HTT spacer sequence CTCN PAM
ccagaaggacuuggugucac

SEQ ID NO: 21231 - RNA, 20 nt, Artificial Sequence
  HTT spacer sequence CTCN PAM
agaaggacuuggugucacuu

SEQ ID NO: 21232 - RNA, 20 nt, Artificial Sequence
  HTT spacer sequence CTCN PAM
acgucugaagugacaccaag

SEQ ID NO: 21233 - RNA, 20 nt, Artificial Sequence
  HTT spacer sequence CTCN PAM
cuacgucugaagugacacca

SEQ ID NO: 21234 - RNA, 20 nt, Artificial Sequence
  HTT spacer sequence CTCN PAM
gccagaauaguuauaaauca

SEQ ID NO: 21235 - RNA, 20 nt, Artificial Sequence
  HTT spacer sequence CTCN PAM
aggaaagacccagaauucag

SEQ ID NO: 21236 - RNA, 20 nt, Artificial Sequence
  HTT spacer sequence CTCN PAM
uguuugggcccacauuucuu

SEQ ID NO: 21237 - RNA, 20 nt, Artificial Sequence
  HTT spacer sequence CTCN PAM
gagguaacgggaaguacacu

SEQ ID NO: 21238 - RNA, 20 nt, Artificial Sequence
  HTT spacer sequence CTCN PAM
gagggccagaagaaaugugg

SEQ ID NO: 21239 - RNA, 20 nt, Artificial Sequence
  HTT spacer sequence CTCN PAM
agggguccgugagaccugcc

SEQ ID NO: 21240 - RNA, 20 nt, Artificial Sequence
  HTT spacer sequence CTCN PAM
agauauaguguacuucccgu

SEQ ID NO: 21241 - RNA, 20 nt, Artificial Sequence
  HTT spacer sequence CTCN PAM
cggaccccucgagauauagu

SEQ ID NO: 21242 - RNA, 20 nt, Artificial Sequence
  HTT spacer sequence CTCN PAM
ucugcagggcugugaggucu

SEQ ID NO: 21243 - RNA, 20 nt, Artificial Sequence
  HTT spacer sequence CTCN PAM
gcagggcugugaggucuggc

SEQ ID NO: 21244 - RNA, 20 nt, Artificial Sequence
  HTT spacer sequence CTCN PAM
cagcccugcagaggagcugc

SEQ ID NO: 21245 - RNA, 20 nt, Artificial Sequence
  HTT spacer sequence CTCN PAM
cggucagcccagaaagugcu

SEQ ID NO: 21246 - RNA, 20 nt, Artificial Sequence
  HTT spacer sequence CTCN PAM
ccauggagaauguggagucu

SEQ ID NO: 21247 - RNA, 20 nt, Artificial Sequence
  HTT spacer sequence CTCN PAM
auggugaggucccgguaucc

SEQ ID NO: 21248 - RNA, 20 nt, Artificial Sequence
  HTT spacer sequence CTCN PAM
acauucuccauggugagguc

SEQ ID NO: 21249 - RNA, 20 nt, Artificial Sequence
  HTT spacer sequence CTCN PAM
gcagcuucaucuguaaaaug

SEQ ID NO: 21250 - RNA, 20 nt, Artificial Sequence
  HTT spacer sequence CTCN PAM
gucaaucagcccauuuuaca

SEQ ID NO: 21251 - RNA, 20 nt, Artificial Sequence
  HTT spacer sequence CTCN PAM
gaaaaguguuuacaugcuau

SEQ ID NO: 21252 - RNA, 20 nt, Artificial Sequence
  HTT spacer sequence CTCN PAM
ucagaaaaguguuuacaugc

SEQ ID NO: 21253 - RNA, 20 nt, Artificial Sequence
  HTT spacer sequence CTCN PAM
gcaggcucugcuguuguggc

SEQ ID NO: 21254 - RNA, 20 nt, Artificial Sequence
  HTT spacer sequence CTCN PAM
gcuguuguggcaggcuuuug

SEQ ID NO: 21255 - RNA, 20 nt, Artificial Sequence
  HTT spacer sequence CTCN PAM
acaaaagccugccacaacag

SEQ ID NO: 21256 - RNA, 20 nt, Artificial Sequence
  HTT spacer sequence CTCN PAM
gcaucucaacaaaagccugc

SEQ ID NO: 21257 - RNA, 20 nt, Artificial Sequence
  HTT spacer sequence CTCN PAM
gcagccugugcugcuuaaag

SEQ ID NO: 21258 - RNA, 20 nt, Artificial Sequence
  HTT spacer sequence CTCN PAM
gcuuuaagcagcacaggcug

SEQ ID NO: 21259 - RNA, 20 nt, Artificial Sequence
  HTT spacer sequence CTCN PAM
ggcccccucugcuuuaagca

SEQ ID NO: 21260 - RNA, 20 nt, Artificial Sequence
  HTT spacer sequence CTCN PAM
uuccuccgcaagccagcccc

SEQ ID NO: 21261 - RNA, 20 nt, Artificial Sequence
  HTT spacer sequence CTCN PAM
gcaagccagccccucacagg

SEQ ID NO: 21262 - RNA, 20 nt, Artificial Sequence
  HTT spacer sequence CTCN PAM
cagggauucccguaagauuu

SEQ ID NO: 21263 - RNA, 20 nt, Artificial Sequence
  HTT spacer sequence CTCN PAM
cucauacagccuuaccugau

SEQ ID NO: 21264 - RNA, 20 nt, Artificial Sequence
  HTT spacer sequence CTCN PAM
uacagccuuaccugaugggg

SEQ ID NO: 21265 - RNA, 20 nt, Artificial Sequence
  HTT spacer sequence CTCN PAM
gcugacguguuucucuccca

SEQ ID NO: 21266 - RNA, 20 nt, Artificial Sequence
  HTT spacer sequence CTCN PAM
cccacacaccaggccacuug

SEQ ID NO: 21267 - RNA, 20 nt, Artificial Sequence
  HTT spacer sequence CTCN PAM
cacacaccaggccacuugga

SEQ ID NO: 21268 - RNA, 20 nt, Artificial Sequence
  HTT spacer sequence CTCN PAM
aaguggccugguguguggga

SEQ ID NO: 21269 - RNA, 20 nt, Artificial Sequence
  HTT spacer sequence CTCN PAM
uggacgccaucucauugggg

SEQ ID NO: 21270 - RNA, 20 nt, Artificial Sequence
  HTT spacer sequence CTCN PAM
uuggggcucaucacaguauc

SEQ ID NO: 21271 - RNA, 20 nt, Artificial Sequence
  HTT spacer sequence CTCN PAM
ucacaguaucaagguagaag

SEQ ID NO: 21272 - RNA, 20 nt, Artificial Sequence
  HTT spacer sequence CTCN PAM
ucuaccuugauacugugaug

SEQ ID NO: 21273 - RNA, 20 nt, Artificial Sequence
  HTT spacer sequence CTCN PAM
gcuuccucuucuaccuugau

SEQ ID NO: 21274 - RNA, 20 nt, Artificial Sequence
  HTT spacer sequence CTCN PAM
guggccaagggaccuguccc

SEQ ID NO: 21275 - RNA, 20 nt, Artificial Sequence
  HTT spacer sequence CTCN PAM
gccagaccccauggucgugg

SEQ ID NO: 21276 - RNA, 20 nt, Artificial Sequence
  HTT spacer sequence CTCN PAM
guggucagacaggggugcug

SEQ ID NO: 21277 - RNA, 20 nt, Artificial Sequence
  HTT spacer sequence CTCN PAM
ggucacagcagcaccccugu

SEQ ID NO: 21278 - RNA, 20 nt, Artificial Sequence
  HTT spacer sequence CTCN PAM
uuugaagguggugacccugc

SEQ ID NO: 21279 - RNA, 20 nt, Artificial Sequence
  HTT spacer sequence CTCN PAM
uguggagcccagcugugcug

SEQ ID NO: 21280 - RNA, 20 nt, Artificial Sequence
  HTT spacer sequence CTCN PAM
acacgaggggcagggucacc

SEQ ID NO: 21281 - RNA, 20 nt, Artificial Sequence
  HTT spacer sequence CTCN PAM
gccccacagcacagcugggc

SEQ ID NO: 21282 - RNA, 20 nt, Artificial Sequence
  HTT spacer sequence CTCN PAM
ucuuucaggauguggcucug

SEQ ID NO: 21283 - RNA, 20 nt, Artificial Sequence
  HTT spacer sequence CTCN PAM
uucaggauguggcucuguuu

SEQ ID NO: 21284 - RNA, 20 nt, Artificial Sequence
  HTT spacer sequence CTCN PAM
guuuucacugccuaccagcu

SEQ ID NO: 21285 - RNA, 20 nt, Artificial Sequence
  HTT spacer sequence CTCN PAM
ccagccuuccccuugguucu

SEQ ID NO: 21286 - RNA, 20 nt, Artificial Sequence
  HTT spacer sequence CTCN PAM
agccuuccccuugguucuug

SEQ ID NO: 21287 - RNA, 20 nt, Artificial Sequence
  HTT spacer sequence CTCN PAM
aagaaccaaggggaaggcug

SEQ ID NO: 21288 - RNA, 20 nt, Artificial Sequence
  HTT spacer sequence CTCN PAM
guggccagccuauuucucca

SEQ ID NO: 21289 - RNA, 20 nt, Artificial Sequence
  HTT spacer sequence CTCN PAM
auuugcaaccagcaacccug

SEQ ID NO: 21290 - RNA, 20 nt, Artificial Sequence
  HTT spacer sequence CTCN PAM
gaaguuauagccagaaguuu

SEQ ID NO: 21291 - RNA, 20 nt, Artificial Sequence
  HTT spacer sequence CTCN PAM
gugccucagaaguuauagcc

SEQ ID NO: 21292 - RNA, 20 nt, Artificial Sequence
  HTT spacer sequence CTCN PAM
ugccccgcuccgugccucag

SEQ ID NO: 21293 - RNA, 20 nt, Artificial Sequence
  HTT spacer sequence CTCN PAM
cggccagucugggaguggca

SEQ ID NO: 21294 - RNA, 20 nt, Artificial Sequence
  HTT spacer sequence CTCN PAM
gccagucugggaguggcagc

SEQ ID NO: 21295 - RNA, 20 nt, Artificial Sequence
  HTT spacer sequence CTCN PAM
cagacuggccgagagcgcug

SEQ ID NO: 21296 - RNA, 20 nt, Artificial Sequence
  HTT spacer sequence CTCN PAM
uccuccugcaggaagcuucc

SEQ ID NO: 21297 - RNA, 20 nt, Artificial Sequence
  HTT spacer sequence CTCN PAM
uccugcaggaagcuuccucc

SEQ ID NO: 21298 - RNA, 20 nt, Artificial Sequence
  HTT spacer sequence CTCN PAM
ugcaggaagcuuccuccacc

SEQ ID NO: 21299 - RNA, 20 nt, Artificial Sequence
  HTT spacer sequence CTCN PAM
accuuucagcagcccuggag

SEQ ID NO: 21300 - RNA, 20 nt, Artificial Sequence
  HTT spacer sequence CTCN PAM
agggcugcugaaagguggag

SEQ ID NO: 21301 - RNA, 20 nt, Artificial Sequence
  HTT spacer sequence CTCN PAM
augcggcuccagggcugcug

SEQ ID NO: 21302 - RNA, 20 nt, Artificial Sequence
  HTT spacer sequence CTCN PAM
cuucccugcuccaugcggcu

SEQ ID NO: 21303 - RNA, 20 nt, Artificial Sequence
  HTT spacer sequence CTCN PAM
ggcauccuguguguuccagg

SEQ ID NO: 21304 - RNA, 20 nt, Artificial Sequence
  HTT spacer sequence CTCN PAM
cacacagccuggaacacaca

SEQ ID NO: 21305 - RNA, 20 nt, Artificial Sequence
  HTT spacer sequence CTCN PAM
ugccaugccuggcagcugca

SEQ ID NO: 21306 - RNA, 20 nt, Artificial Sequence
  HTT spacer sequence CTCN PAM
ggaaugcagcagggcccugc

SEQ ID NO: 21307 - RNA, 20 nt, Artificial Sequence
  HTT spacer sequence CTCN PAM
cccuguagggauaagcaagu

SEQ ID NO: 21308 - RNA, 20 nt, Artificial Sequence
  HTT spacer sequence CTCN PAM
cuguagggauaagcaagugc

SEQ ID NO: 21309 - RNA, 20 nt, Artificial Sequence
  HTT spacer sequence CTCN PAM
gcaccggcuguccugggcca

SEQ ID NO: 21310 - RNA, 20 nt, Artificial Sequence
  HTT spacer sequence CTCN PAM
ccacacaucccaggccccca

SEQ ID NO: 21311 - RNA, 20 nt, Artificial Sequence
  HTT spacer sequence CTCN PAM
gugacccagcaacuguucug

SEQ ID NO: 21312 - RNA, 20 nt, Artificial Sequence
  HTT spacer sequence CTCN PAM
ugcaaggcgggggacaccag

SEQ ID NO: 21313 - RNA, 20 nt, Artificial Sequence
  HTT spacer sequence CTCN PAM
ggugggccacaaggguuggc

SEQ ID NO: 21314 - RNA, 20 nt, Artificial Sequence
  HTT spacer sequence CTCN PAM
uggaucacaggggcaguggg

SEQ ID NO: 21315 - RNA, 20 nt, Artificial Sequence
  HTT spacer sequence CTCN PAM
ccacugccccugugauccaa

SEQ ID NO: 21316 - RNA, 20 nt, Artificial Sequence
  HTT spacer sequence CTCN PAM
cgaugccucugagcccugcu

SEQ ID NO: 21317 - RNA, 20 nt, Artificial Sequence
  HTT spacer sequence CTCN PAM
gagcccugcucugaggucag

SEQ ID NO: 21318 - RNA, 20 nt, Artificial Sequence
  HTT spacer sequence CTCN PAM
gaggcaucgggagcccuggg

SEQ ID NO: 21319 - RNA, 20 nt, Artificial Sequence
  HTT spacer sequence CTCN PAM
gaggucagccgauguggcuc

SEQ ID NO: 21320 - RNA, 20 nt, Artificial Sequence
  HTT spacer sequence CTCN PAM
gagcagggcucagaggcauc

SEQ ID NO: 21321 - RNA, 20 nt, Artificial Sequence
  HTT spacer sequence CTCN PAM
guccuggcugugaggccuca

SEQ ID NO: 21322 - RNA, 20 nt, Artificial Sequence
  HTT spacer sequence CTCN PAM
cagccaggacugagccacau

SEQ ID NO: 21323 - RNA, 20 nt, Artificial Sequence
  HTT spacer sequence CTCN PAM
cgcugcccugauuccauuug

SEQ ID NO: 21324 - RNA, 20 nt, Artificial Sequence
  HTT spacer sequence CTCN PAM
ucagugcgaggcagacagag

SEQ ID NO: 21325 - RNA, 20 nt, Artificial Sequence
  HTT spacer sequence CTCN PAM
gugcgaggcagacagagccc

SEQ ID NO: 21326 - RNA, 20 nt, Artificial Sequence
  HTT spacer sequence CTCN PAM
cacugaggagcaaauggaau

SEQ ID NO: 21327 - RNA, 20 nt, Artificial Sequence
  HTT spacer sequence CTCN PAM
gucugccucgcacugaggag

SEQ ID NO: 21328 - RNA, 20 nt, Artificial Sequence
  HTT spacer sequence CTCN PAM
ucccuaacgggacacugucu

SEQ ID NO: 21329 - RNA, 20 nt, Artificial Sequence
  HTT spacer sequence CTCN PAM
cuaacgggacacugucuacc

SEQ ID NO: 21330 - RNA, 20 nt, Artificial Sequence
  HTT spacer sequence CTCN PAM
cccgagaaccgucagccccg

SEQ ID NO: 21331 - RNA, 20 nt, Artificial Sequence
  HTT spacer sequence CTCN PAM
ggggagaagaaggaaggggu

SEQ ID NO: 21332 - RNA, 20 nt, Artificial Sequence
  HTT spacer sequence CTCN PAM
cggggcugacgguucucggg

SEQ ID NO: 21333 - RNA, 20 nt, Artificial Sequence
  HTT spacer sequence CTCN PAM
guccacaugcccuacccuag

SEQ ID NO: 21334 - RNA, 20 nt, Artificial Sequence
  HTT spacer sequence CTCN PAM
ccacugcuguucccguaucu

SEQ ID NO: 21335 - RNA, 20 nt, Artificial Sequence
  HTT spacer sequence CTCN PAM
accacccugggguuggggac

SEQ ID NO: 21336 - RNA, 20 nt, Artificial Sequence
  HTT spacer sequence CTCN PAM
cggauggggcugacacccaa

SEQ ID NO: 21337 - RNA, 20 nt, Artificial Sequence
  HTT spacer sequence CTCN PAM
gauggggcugacacccaagg

SEQ ID NO: 21338 - RNA, 20 nt, Artificial Sequence
  HTT spacer sequence CTCN PAM
cugcagaagaaccuggaugu

SEQ ID NO: 21339 - RNA, 20 nt, Artificial Sequence
  HTT spacer sequence CTCN PAM
gcagaagaaccuggauguga

SEQ ID NO: 21340 - RNA, 20 nt, Artificial Sequence
  HTT spacer sequence CTCN PAM
ggccugggcauuagauguca

SEQ ID NO: 21341 - RNA, 20 nt, Artificial Sequence
  HTT spacer sequence CTCN PAM
aguccagcuguccccaagcu

SEQ ID NO: 21342 - RNA, 20 nt, Artificial Sequence
  HTT spacer sequence CTCN PAM
uugacccuguggcuccaguc

SEQ ID NO: 21343 - RNA, 20 nt, Artificial Sequence
  HTT spacer sequence CTCN PAM
cccuccuugacccuguggcu

SEQ ID NO: 21344 - RNA, 20 nt, Artificial Sequence
  HTT spacer sequence CTCN PAM
cagcuggguggacuuugcgc

SEQ ID NO: 21345 - RNA, 20 nt, Artificial Sequence
  HTT spacer sequence CTCN PAM
ucugcccaucggagccggcu

SEQ ID NO: 21346 - RNA, 20 nt, Artificial Sequence
  HTT spacer sequence CTCN PAM
gcccaucggagccggcuggc

SEQ ID NO: 21347 - RNA, 20 nt, Artificial Sequence
  HTT spacer sequence CTCN PAM
gaugggcagaggagcugccu

SEQ ID NO: 21348 - RNA, 20 nt, Artificial Sequence
  HTT spacer sequence CTCN PAM
ugccugggaugggggcagaa

SEQ ID NO: 21349 - RNA, 20 nt, Artificial Sequence
  HTT spacer sequence CTCN PAM
ucugcccccaucccaggcaa

SEQ ID NO: 21350 - RNA, 20 nt, Artificial Sequence
  HTT spacer sequence CTCN PAM
accucuucugcccccauccc

SEQ ID NO: 21351 - RNA, 20 nt, Artificial Sequence
  HTT spacer sequence CTCN PAM
gggccccaggucuccaccuc

SEQ ID NO: 21352 - RNA, 20 nt, Artificial Sequence
  HTT spacer sequence CTCN PAM
auuucuguucccauuaaaag

SEQ ID NO: 21353 - RNA, 20 nt, Artificial Sequence
  HTT spacer sequence CTCN PAM
uccuccauuucuguucccau

SEQ ID NO: 21354 - RNA, 20 nt, Artificial Sequence
  HTT spacer sequence CTCN PAM
gucucuuccuccauuucugu

SEQ ID NO: 21355 - RNA, 20 nt, Artificial Sequence
  HTT spacer sequence CTCN PAM
ccgaccccuacugccugccu

SEQ ID NO: 21356 - RNA, 20 nt, Artificial Sequence
  HTT spacer sequence CTCN PAM
ccaggcaggcaguagggguc

SEQ ID NO: 21357 - RNA, 20 nt, Artificial Sequence
  HTT spacer sequence CTCN PAM
gugugggggaagccugggga

SEQ ID NO: 21358 - RNA, 20 nt, Artificial Sequence
  HTT spacer sequence CTCN PAM
cauccccaggcuucccccac

SEQ ID NO: 21359 - RNA, 20 nt, Artificial Sequence
  HTT spacer sequence CTCN PAM
cacauccccaggcuuccccc

SEQ ID NO: 21360 - RNA, 20 nt, Artificial Sequence
  HTT spacer sequence CTCN PAM
caacuuuaaaguuggucuuc

SEQ ID NO: 21361 - RNA, 20 nt, Artificial Sequence
  HTT spacer sequence CTCN PAM
gggcacugcucccaacuuua

SEQ ID NO: 21362 - RNA, 20 nt, Artificial Sequence
  HTT spacer sequence CTCN PAM
gcuuuuugaaaaagaagucc

SEQ ID NO: 21363 - RNA, 20 nt, Artificial Sequence
  HTT spacer sequence CTCN PAM
gaccagcgccuggcggggcg

SEQ ID NO: 21364 - RNA, 20 nt, Artificial Sequence
  HTT spacer sequence CTCN PAM
gacgcucagaccagcgccug

SEQ ID NO: 21365 - RNA, 20 nt, Artificial Sequence
  HTT spacer sequence CTCN PAM
agagggcgggcggcuccagu

SEQ ID NO: 21366 - RNA, 20 nt, Artificial Sequence
  HTT spacer sequence CTCN PAM
ggagcaagcgcaccaucugg

SEQ ID NO: 21367 - RNA, 20 nt, Artificial Sequence
  HTT spacer sequence CTCN PAM
aguggccgccgcgggacggu

SEQ ID NO: 21368 - RNA, 20 nt, Artificial Sequence
  HTT spacer sequence CTCN PAM
ggccccaccgucccgcggcg

SEQ ID NO: 21369 - RNA, 20 nt, Artificial Sequence
  HTT spacer sequence CTCN PAM
cccacccccacgggccccuc

SEQ ID NO: 21370 - RNA, 20 nt, Artificial Sequence
  HTT spacer sequence CTCN PAM
ugcgggcggcucccccaccc

SEQ ID NO: 21371 - RNA, 20 nt, Artificial Sequence
  HTT spacer sequence CTCN PAM
uucuccugcgggcggcuccc

SEQ ID NO: 21372 - RNA, 20 nt, Artificial Sequence
  HTT spacer sequence CTCN PAM
agggccggcgcgggcggggc

SEQ ID NO: 21373 - RNA, 20 nt, Artificial Sequence
  HTT spacer sequence CTCN PAM
uggcccagcccagggcccug

SEQ ID NO: 21374 - RNA, 20 nt, Artificial Sequence
  HTT spacer sequence CTCN PAM
cagggcccugggcugggcca

SEQ ID NO: 21375 - RNA, 20 nt, Artificial Sequence
  HTT spacer sequence CTCN PAM
ccccggcgccccagcccagg

SEQ ID NO: 21376 - RNA, 20 nt, Artificial Sequence
  HTT spacer sequence CTCN PAM
gucaucuucugucaugguuc

SEQ ID NO: 21377 - RNA, 20 nt, Artificial Sequence
  HTT spacer sequence CTCN PAM
accagcgccgccucggucau

SEQ ID NO: 21378 - RNA, 20 nt, Artificial Sequence
  HTT spacer sequence CTCN PAM
cgcuccccccuguccccgca

SEQ ID NO: 21379 - RNA, 20 nt, Artificial Sequence
  HTT spacer sequence CTCN PAM
ccccuguccccgcaguggaa

SEQ ID NO: 21380 - RNA, 20 nt, Artificial Sequence
  HTT spacer sequence CTCN PAM
uccacugcggggacaggggg

SEQ ID NO: 21381 - RNA, 20 nt, Artificial Sequence
  HTT spacer sequence CTCN PAM
ccugccacgggcgacggcuu

SEQ ID NO: 21382 - RNA, 20 nt, Artificial Sequence
  HTT spacer sequence CTCN PAM
guaacccgugucgcuacccc

SEQ ID NO: 21383 - RNA, 20 nt, Artificial Sequence
  HTT spacer sequence CTCN PAM
gguuucccggcggggugaca

SEQ ID NO: 21384 - RNA, 20 nt, Artificial Sequence
  HTT spacer sequence CTCN PAM
cggguuucccggcgggguga

SEQ ID NO: 21385 - RNA, 20 nt, Artificial Sequence
  HTT spacer sequence CTCN PAM
caggggcgccgggggguccg

SEQ ID NO: 21386 - RNA, 20 nt, Artificial Sequence
  HTT spacer sequence CTCN PAM
uuccagcagggcagacugag

SEQ ID NO: 21387 - RNA, 20 nt, Artificial Sequence
  HTT spacer sequence CTCN PAM
gucugcccugcuggaaagag

SEQ ID NO: 21388 - RNA, 20 nt, Artificial Sequence
  HTT spacer sequence CTCN PAM
ggccucagucugcccugcug

SEQ ID NO: 21389 - RNA, 20 nt, Artificial Sequence
  HTT spacer sequence CTCN PAM
gccuacagggccaccaggca

SEQ ID NO: 21390 - RNA, 20 nt, Artificial Sequence
  HTT spacer sequence CTCN PAM
gggccugcguccccuccgcc

SEQ ID NO: 21391 - RNA, 20 nt, Artificial Sequence
  HTT spacer sequence CTCN PAM
gcuggggggcucagggccug

SEQ ID NO: 21392 - RNA, 20 nt, Artificial Sequence
  HTT spacer sequence CTCN PAM
gguauguggggcuuugcuuc

SEQ ID NO: 21393 - RNA, 20 nt, Artificial Sequence
  HTT spacer sequence CTCN PAM
acccucagguauguggggcu

SEQ ID NO: 21394 - RNA, 20 nt, Artificial Sequence
  HTT spacer sequence CTCN PAM
gagcagggcccccgaaccca

SEQ ID NO: 21395 - RNA, 20 nt, Artificial Sequence
  HTT spacer sequence CTCN PAM
gagcguuuccacaagcacag

SEQ ID NO: 21396 - RNA, 20 nt, Artificial Sequence
  HTT spacer sequence CTCN PAM
aggggugcugcguggguuag

SEQ ID NO: 21397 - RNA, 20 nt, Artificial Sequence
  HTT spacer sequence CTCN PAM
caggcagacgagaggcuggg

SEQ ID NO: 21398 - RNA, 20 nt, Artificial Sequence
  HTT spacer sequence CTCN PAM
ucugccugggagggguccag

SEQ ID NO: 21399 - RNA, 20 nt, Artificial Sequence
  HTT spacer sequence CTCN PAM
cgucugccugggaggggucc

SEQ ID NO: 21400 - RNA, 20 nt, Artificial Sequence
  HTT spacer sequence CTCN PAM
gcccugcccuaccgcagccc

SEQ ID NO: 21401 - RNA, 20 nt, Artificial Sequence
  HTT spacer sequence CTCN PAM
gggaggaggcaggggucccc

SEQ ID NO: 21402 - RNA, 20 nt, Artificial Sequence
  HTT spacer sequence CTCN PAM
cagaggacuguucccccagc

SEQ ID NO: 21403 - RNA, 20 nt, Artificial Sequence
  HTT spacer sequence CTCN PAM
ucccagaggacuguuccccc

SEQ ID NO: 21404 - RNA, 20 nt, Artificial Sequence
  HTT spacer sequence CTCN PAM
gggcggggacugggggggga

SEQ ID NO: 21405 - RNA, 20 nt, Artificial Sequence
  HTT spacer sequence CTCN PAM
ccaagcuggggugcuggcuc

SEQ ID NO: 21406 - RNA, 20 nt, Artificial Sequence
  HTT spacer sequence CTCN PAM
augcugacccuccccaagcu

SEQ ID NO: 21407 - RNA, 20 nt, Artificial Sequence
  HTT spacer sequence CTCN PAM
cuacaggcccagcgcugcag

SEQ ID NO: 21408 - RNA, 20 nt, Artificial Sequence
  HTT spacer sequence CTCN PAM
gcccucccuacaggcccagc

SEQ ID NO: 21409 - RNA, 20 nt, Artificial Sequence
  HTT spacer sequence CTCN PAM
agaggacaggugcggcagag

SEQ ID NO: 21410 - RNA, 20 nt, Artificial Sequence
  HTT spacer sequence CTCN PAM
ggagcagcugcaggcccggc

SEQ ID NO: 21411 - RNA, 20 nt, Artificial Sequence
  HTT spacer sequence CTCN PAM
gccgcaccuguccucuggag

SEQ ID NO: 21412 - RNA, 20 nt, Artificial Sequence
  HTT spacer sequence CTCN PAM
gccugugugcauggggggcu

SEQ ID NO: 21413 - RNA, 20 nt, Artificial Sequence
  HTT spacer sequence CTCN PAM
ggcagcccccuggcguacag

SEQ ID NO: 21414 - RNA, 20 nt, Artificial Sequence
  HTT spacer sequence CTCN PAM
aggacgggugucugugacuc

SEQ ID NO: 21415 - RNA, 20 nt, Artificial Sequence
  HTT spacer sequence CTCN PAM
cagggaggguguggggcagg

SEQ ID NO: 21416 - RNA, 20 nt, Artificial Sequence
  HTT spacer sequence CTCN PAM
cugggagucacagacacccg

SEQ ID NO: 21417 - RNA, 20 nt, Artificial Sequence
  HTT spacer sequence CTCN PAM
ugcguccccucugcagggcc

SEQ ID NO: 21418 - RNA, 20 nt, Artificial Sequence
  HTT spacer sequence CTCN PAM
gcagggccucaggugguccu

SEQ ID NO: 21419 - RNA, 20 nt, Artificial Sequence
  HTT spacer sequence CTCN PAM
ggugguccuggaggaaagca

SEQ ID NO: 21420 - RNA, 20 nt, Artificial Sequence
  HTT spacer sequence CTCN PAM
aggaccaccugaggcccugc

SEQ ID NO: 21421 - RNA, 20 nt, Artificial Sequence
  HTT spacer sequence CTCN PAM
gccuccccuugcagggccug

SEQ ID NO: 21422 - RNA, 20 nt, Artificial Sequence
  HTT spacer sequence CTCN PAM
ccuugcagggccuggacugc

SEQ ID NO: 21423 - RNA, 20 nt, Artificial Sequence
  HTT spacer sequence CTCN PAM
acucagcccuccgugcccag

SEQ ID NO: 21424 - RNA, 20 nt, Artificial Sequence
  HTT spacer sequence CTCN PAM
gcccuccgugcccagaccuc

SEQ ID NO: 21425 - RNA, 20 nt, Artificial Sequence
  HTT spacer sequence CTCN PAM
gugcccagaccuccugccug

SEQ ID NO: 21426 - RNA, 20 nt, Artificial Sequence
  HTT spacer sequence CTCN PAM
ugccuggagcugugggggca

SEQ ID NO: 21427 - RNA, 20 nt, Artificial Sequence
  HTT spacer sequence CTCN PAM
aggcaggaggucugggcacg

SEQ ID NO: 21428 - RNA, 20 nt, Artificial Sequence
  HTT spacer sequence CTCN PAM
gucggugcccccacagcucc

SEQ ID NO: 21429 - RNA, 20 nt, Artificial Sequence
  HTT spacer sequence CTCN PAM
caggcucugucggugccccc

SEQ ID NO: 21430 - RNA, 20 nt, Artificial Sequence
  HTT spacer sequence CTCN PAM
ggggcugcaggggaccuggu

SEQ ID NO: 21431 - RNA, 20 nt, Artificial Sequence
  HTT spacer sequence CTCN PAM
gcccagaccccaucccuucc

SEQ ID NO: 21432 - RNA, 20 nt, Artificial Sequence
  HTT spacer sequence CTCN PAM
cucugcccagaccccauccc

SEQ ID NO: 21433 - RNA, 20 nt, Artificial Sequence
  HTT spacer sequence CTCN PAM
cacucugcccagaccccauc

SEQ ID NO: 21434 - RNA, 20 nt, Artificial Sequence
  HTT spacer sequence CTCN PAM
agcccagcaccauccaccaa

SEQ ID NO: 21435 - RNA, 20 nt, Artificial Sequence
  HTT spacer sequence CTCN PAM
agagaggccgcaucccagga

SEQ ID NO: 21436 - RNA, 20 nt, Artificial Sequence
  HTT spacer sequence CTCN PAM
ggagggucugcaccggcucc

SEQ ID NO: 21437 - RNA, 20 nt, Artificial Sequence
  HTT spacer sequence CTCN PAM
cuggagggucugcaccggcu

SEQ ID NO: 21438 - RNA, 20 nt, Artificial Sequence
  HTT spacer sequence CTCN PAM
uugggggcugcugucccggg

SEQ ID NO: 21439 - RNA, 20 nt, Artificial Sequence
  HTT spacer sequence CTCN PAM
ucuuugggggcugcuguccc

SEQ ID NO: 21440 - RNA, 20 nt, Artificial Sequence
  HTT spacer sequence CTCN PAM
cccgacacuccucuuugggg

SEQ ID NO: 21441 - RNA, 20 nt, Artificial Sequence
  HTT spacer sequence CTCN PAM
aacagggacaaagacuucuc

SEQ ID NO: 21442 - RNA, 20 nt, Artificial Sequence
  HTT spacer sequence CTCN PAM
ugggacugucugaugcagaa

SEQ ID NO: 21443 - RNA, 20 nt, Artificial Sequence
  HTT spacer sequence CTCN PAM
agagggugugcucccccggc

SEQ ID NO: 21444 - RNA, 20 nt, Artificial Sequence
  HTT spacer sequence CTCN PAM
ugaggcuggcaggcccugcc

SEQ ID NO: 21445 - RNA, 20 nt, Artificial Sequence
  HTT spacer sequence CTCN PAM
cccggccggugagugccuga

SEQ ID NO: 21446 - RNA, 20 nt, Artificial Sequence
  HTT spacer sequence CTCN PAM
ccggccgggggagcacaccc

SEQ ID NO: 21447 - RNA, 20 nt, Artificial Sequence
  HTT spacer sequence CTCN PAM
ggcacucaccggccggggga

SEQ ID NO: 21448 - RNA, 20 nt, Artificial Sequence
  HTT spacer sequence CTCN PAM
acucaggcacucaccggccg

SEQ ID NO: 21449 - RNA, 20 nt, Artificial Sequence
  HTT spacer sequence CTCN PAM
ugucacuccacucaggcacu

SEQ ID NO: 21450 - RNA, 20 nt, Artificial Sequence
  HTT spacer sequence CTCN PAM
cagauugucccaccuggggg

SEQ ID NO: 21451 - RNA, 20 nt, Artificial Sequence
  HTT spacer sequence CTCN PAM
cgagcgucugcuggguuauc

SEQ ID NO: 21452 - RNA, 20 nt, Artificial Sequence
  HTT spacer sequence CTCN PAM
ggagccaccauguucaccua

SEQ ID NO: 21453 - RNA, 20 nt, Artificial Sequence
  HTT spacer sequence CTCN PAM
acugcgcaggauacgggaua

SEQ ID NO: 21454 - RNA, 20 nt, Artificial Sequence
  HTT spacer sequence CTCN PAM
cacgccagccccagaaggcu

SEQ ID NO: 21455 - RNA, 20 nt, Artificial Sequence
  HTT spacer sequence CTCN PAM
ggguggauguucauuccaag

SEQ ID NO: 21456 - RNA, 20 nt, Artificial Sequence
  HTT spacer sequence CTCN PAM
aggcuuggaaugaacaucca

SEQ ID NO: 21457 - RNA, 20 nt, Artificial Sequence
  HTT spacer sequence CTCN PAM
cuggccugggacccauugcu

SEQ ID NO: 21458 - RNA, 20 nt, Artificial Sequence
  HTT spacer sequence CTCN PAM
agcagcccaggguugaaacu

SEQ ID NO: 21459 - RNA, 20 nt, Artificial Sequence
  HTT spacer sequence CTCN PAM
gggcaaccccacaggguguc

SEQ ID NO: 21460 - RNA, 20 nt, Artificial Sequence
  HTT spacer sequence CTCN PAM
ucugaccgaccucugggcaa

SEQ ID NO: 21461 - RNA, 20 nt, Artificial Sequence
  HTT spacer sequence CTCN PAM
gucccauccccucaucugac

SEQ ID NO: 21462 - RNA, 20 nt, Artificial Sequence
  HTT spacer sequence CTCN PAM
gcucugucccauccccucau

SEQ ID NO: 21463 - RNA, 20 nt, Artificial Sequence
  HTT spacer sequence CTCN PAM
cgcccaccuccccacccuga

SEQ ID NO: 21464 - RNA, 20 nt, Artificial Sequence
  HTT spacer sequence CTCN PAM
ccacccugaccaggccagcc

SEQ ID NO: 21465 - RNA, 20 nt, Artificial Sequence
  HTT spacer sequence CTCN PAM
ucuccgcucagaggcccuga

SEQ ID NO: 21466 - RNA, 20 nt, Artificial Sequence
  HTT spacer sequence CTCN PAM
ccgcucagaggcccugaugc

SEQ ID NO: 21467 - RNA, 20 nt, Artificial Sequence
  HTT spacer sequence CTCN PAM
gcucagaggcccugaugccu

SEQ ID NO: 21468 - RNA, 20 nt, Artificial Sequence
  HTT spacer sequence CTCN PAM
gaggcccugaugccucuucc

SEQ ID NO: 21469 - RNA, 20 nt, Artificial Sequence
  HTT spacer sequence CTCN PAM
gagcggagaggaggugccag

SEQ ID NO: 21470 - RNA, 20 nt, Artificial Sequence
  HTT spacer sequence CTCN PAM
uccccuggccccucauaagc

SEQ ID NO: 21471 - RNA, 20 nt, Artificial Sequence
  HTT spacer sequence CTCN PAM
uaagccucccuagaugcugc

SEQ ID NO: 21472 - RNA, 20 nt, Artificial Sequence
  HTT spacer sequence CTCN PAM
cuagaugcugcccccuuugc

SEQ ID NO: 21473 - RNA, 20 nt, Artificial Sequence
  HTT spacer sequence CTCN PAM
gcgcuggagaccaccucccu

SEQ ID NO: 21474 - RNA, 20 nt, Artificial Sequence
  HTT spacer sequence CTCN PAM
agcgcugagcgggaaggcag

SEQ ID NO: 21475 - RNA, 20 nt, Artificial Sequence
  HTT spacer sequence CTCN PAM
cuuguggaugggcccggcgu

SEQ ID NO: 21476 - RNA, 20 nt, Artificial Sequence
  HTT spacer sequence CTCN PAM
acgccgggcccauccacaag

SEQ ID NO: 21477 - RNA, 20 nt, Artificial Sequence
  HTT spacer sequence CTCN PAM
cuccacgccgggcccaucca

SEQ ID NO: 21478 - RNA, 20 nt, Artificial Sequence
  HTT spacer sequence CTCN PAM
agggcuggggccugcucccu

SEQ ID NO: 21479 - RNA, 20 nt, Artificial Sequence
  HTT spacer sequence CTCN PAM
uccagggcuggggccugcuc

SEQ ID NO: 21480 - RNA, 20 nt, Artificial Sequence
  HTT spacer sequence CTCN PAM
uggugugagggagagaggaa

SEQ ID NO: 21481 - RNA, 20 nt, Artificial Sequence
  HTT spacer sequence CTCN PAM
caccaggagcgcagggucug

SEQ ID NO: 21482 - RNA, 20 nt, Artificial Sequence
  HTT spacer sequence CTCN PAM
cucacaccaggagcgcaggg

SEQ ID NO: 21483 - RNA, 20 nt, Artificial Sequence
  HTT spacer sequence CTCN PAM
cccucacaccaggagcgcag

SEQ ID NO: 21484 - RNA, 20 nt, Artificial Sequence
  HTT spacer sequence CTCN PAM
cucccucacaccaggagcgc

SEQ ID NO: 21485 - RNA, 20 nt, Artificial Sequence
  HTT spacer sequence CTCN PAM
uccuugcguuuuucucaauc

SEQ ID NO: 21486 - RNA, 20 nt, Artificial Sequence
  HTT spacer sequence CTCN PAM
uugcguuuuucucaaucgug

SEQ ID NO: 21487 - RNA, 20 nt, Artificial Sequence
  HTT spacer sequence CTCN PAM
aucgugagcacgucuuucug

SEQ ID NO: 21488 - RNA, 20 nt, Artificial Sequence
  HTT spacer sequence CTCN PAM
cgauugagaaaaacgcaagg

SEQ ID NO: 21489 - RNA, 20 nt, Artificial Sequence
  HTT spacer sequence CTCN PAM
gccacagcgccuggcauggc

SEQ ID NO: 21490 - RNA, 20 nt, Artificial Sequence
  HTT spacer sequence CTCN PAM
gugugggacugcagggugcc

SEQ ID NO: 21491 - RNA, 20 nt, Artificial Sequence
  HTT spacer sequence CTCN PAM
augucuccaccgcguccuca

SEQ ID NO: 21492 - RNA, 20 nt, Artificial Sequence
  HTT spacer sequence CTCN PAM
accgcguccucacugcggaa

SEQ ID NO: 21493 - RNA, 20 nt, Artificial Sequence
  HTT spacer sequence CTCN PAM
cugcggaaugcgugucugcg

SEQ ID NO: 21494 - RNA, 20 nt, Artificial Sequence
  HTT spacer sequence CTCN PAM
cugggcagggccccggggga

SEQ ID NO: 21495 - RNA, 20 nt, Artificial Sequence
  HTT spacer sequence CTCN PAM
gggcagggccccgggggagg

SEQ ID NO: 21496 - RNA, 20 nt, Artificial Sequence
  HTT spacer sequence CTCN PAM
cccggggcccugcccagaga

SEQ ID NO: 21497 - RNA, 20 nt, Artificial Sequence
  HTT spacer sequence CTCN PAM
ucccccggggcccugcccag

SEQ ID NO: 21498 - RNA, 20 nt, Artificial Sequence
  HTT spacer sequence CTCN PAM
cugcugguggcccugcaugc

SEQ ID NO: 21499 - RNA, 20 nt, Artificial Sequence
  HTT spacer sequence CTCN PAM
cuucuuccucccaggugcgg

SEQ ID NO: 21500 - RNA, 20 nt, Artificial Sequence
  HTT spacer sequence CTCN PAM
ucuuccucccaggugcgggg

SEQ ID NO: 21501 - RNA, 20 nt, Artificial Sequence
  HTT spacer sequence CTCN PAM
caggugcgggggcugggggu

SEQ ID NO: 21502 - RNA, 20 nt, Artificial Sequence
  HTT spacer sequence CTCN PAM
ccacccccagcccccgcacc

SEQ ID NO: 21503 - RNA, 20 nt, Artificial Sequence
  HTT spacer sequence CTCN PAM
acaggaugucaagaacacuu

SEQ ID NO: 21504 - RNA, 20 nt, Artificial Sequence
  HTT spacer sequence CTCN PAM
ccacaggaugucaagaacac

SEQ ID NO: 21505 - RNA, 20 nt, Artificial Sequence
  HTT spacer sequence CTCN PAM
agugucuggccuggggccac

SEQ ID NO: 21506 - RNA, 20 nt, Artificial Sequence
  HTT spacer sequence CTCN PAM
gaaaagccaccgggagggcc

SEQ ID NO: 21507 - RNA, 20 nt, Artificial Sequence
  HTT spacer sequence CTCN PAM
cgguggcuuuucugagcugg

SEQ ID NO: 21508 - RNA, 20 nt, Artificial Sequence
  HTT spacer sequence CTCN PAM
ggcccucccgguggcuuuuc

SEQ ID NO: 21509 - RNA, 20 nt, Artificial Sequence
  HTT spacer sequence CTCN PAM
aggacucgggcccucccggu

SEQ ID NO: 21510 - RNA, 20 nt, Artificial Sequence
  HTT spacer sequence CTCN PAM
aagacccugccagcuccagg

SEQ ID NO: 21511 - RNA, 20 nt, Artificial Sequence
  HTT spacer sequence CTCN PAM
gaaacccgagggaucuggcc

SEQ ID NO: 21512 - RNA, 20 nt, Artificial Sequence
  HTT spacer sequence CTCN PAM
gguuucugaguuucagcuuc

SEQ ID NO: 21513 - RNA, 20 nt, Artificial Sequence
  HTT spacer sequence CTCN PAM
gcccagcaguccaugucuug

SEQ ID NO: 21514 - RNA, 20 nt, Artificial Sequence
  HTT spacer sequence CTCN PAM
ccuauccuugcucucggugg

SEQ ID NO: 21515 - RNA, 20 nt, Artificial Sequence
  HTT spacer sequence CTCN PAM
cggugggacugagcccggcc

SEQ ID NO: 21516 - RNA, 20 nt, Artificial Sequence
  HTT spacer sequence CTCN PAM
gugggacugagcccggccug

SEQ ID NO: 21517 - RNA, 20 nt, Artificial Sequence
  HTT spacer sequence CTCN PAM
gucccaccgagagcaaggau

SEQ ID NO: 21518 - RNA, 20 nt, Artificial Sequence
  HTT spacer sequence CTCN PAM
ugcaggccgggcucaguccc

SEQ ID NO: 21519 - RNA, 20 nt, Artificial Sequence
  HTT spacer sequence CTCN PAM
guggggucccuccugcaggc

SEQ ID NO: 21520 - RNA, 20 nt, Artificial Sequence
  HTT spacer sequence CTCN PAM
ugcgccgucuccgugggguc

SEQ ID NO: 21521 - RNA, 20 nt, Artificial Sequence
  HTT spacer sequence CTCN PAM
cggcuccugcgccgucuccg

SEQ ID NO: 21522 - RNA, 20 nt, Artificial Sequence
  HTT spacer sequence CTCN PAM
cggggcaccugccagggggc

SEQ ID NO: 21523 - RNA, 20 nt, Artificial Sequence
  HTT spacer sequence CTCN PAM
ggggcucacggggcaccugc

SEQ ID NO: 21524 - RNA, 20 nt, Artificial Sequence
  HTT spacer sequence CTCN PAM
acagcgccuccgcuaacgag

SEQ ID NO: 21525 - RNA, 20 nt, Artificial Sequence
  HTT spacer sequence CTCN PAM
gcuaacgaggggcugggggu

SEQ ID NO: 21526 - RNA, 20 nt, Artificial Sequence
  HTT spacer sequence CTCN PAM
uuagcggaggcgcuguggag

SEQ ID NO: 21527 - RNA, 20 nt, Artificial Sequence
  HTT spacer sequence CTCN PAM
ggaagggccgacccaguguc

SEQ ID NO: 21528 - RNA, 20 nt, Artificial Sequence
  HTT spacer sequence CTCN PAM
gcucaggaagggccgaccca

SEQ ID NO: 21529 - RNA, 20 nt, Artificial Sequence
  HTT spacer sequence CTCN PAM
uggugguggauuuccugugc

SEQ ID NO: 21530 - RNA, 20 nt, Artificial Sequence
  HTT spacer sequence CTCN PAM
ugccccaacggacuggggcu

SEQ ID NO: 21531 - RNA, 20 nt, Artificial Sequence
  HTT spacer sequence CTCN PAM
gggcugaagaccgggcgugg

SEQ ID NO: 21532 - RNA, 20 nt, Artificial Sequence
  HTT spacer sequence CTCN PAM
ccccauagaaacaucaagaa

SEQ ID NO: 21533 - RNA, 20 nt, Artificial Sequence
  HTT spacer sequence CTCN PAM
ccauagaaacaucaagaaca

SEQ ID NO: 21534 - RNA, 20 nt, Artificial Sequence
  HTT spacer sequence CTCN PAM
gcccccgcgucaggacaggg

SEQ ID NO: 21535 - RNA, 20 nt, Artificial Sequence
  HTT spacer sequence CTCN PAM
gauucccuguccugacgcgg

SEQ ID NO: 21536 - RNA, 20 nt, Artificial Sequence
  HTT spacer sequence CTCN PAM
cugauucccuguccugacgc

SEQ ID NO: 21537 - RNA, 20 nt, Artificial Sequence
  HTT spacer sequence CTCN PAM
cagcuccacaugugggagca

SEQ ID NO: 21538 - RNA, 20 nt, Artificial Sequence
  HTT spacer sequence CTCN PAM
gcuccacaugugggagcagu

SEQ ID NO: 21539 - RNA, 20 nt, Artificial Sequence
  HTT spacer sequence CTCN PAM
acaugugggagcagugaccu

SEQ ID NO: 21540 - RNA, 20 nt, Artificial Sequence
  HTT spacer sequence CTCN PAM
cacauguggagcugagagcu

SEQ ID NO: 21541 - RNA, 20 nt, Artificial Sequence
  HTT spacer sequence CTCN PAM
uuccccgccugcguccucgu

SEQ ID NO: 21542 - RNA, 20 nt, Artificial Sequence
  HTT spacer sequence CTCN PAM
ucuacucacagggcucuuga

SEQ ID NO: 21543 - RNA, 20 nt, Artificial Sequence
  HTT spacer sequence CTCN PAM
cagggcucuugagggcaaug

SEQ ID NO: 21544 - RNA, 20 nt, Artificial Sequence
  HTT spacer sequence CTCN PAM
ugagggcaauggagaggugg

SEQ ID NO: 21545 - RNA, 20 nt, Artificial Sequence
  HTT spacer sequence CTCN PAM
agagcccugugaguagacga

SEQ ID NO: 21546 - RNA, 20 nt, Artificial Sequence
  HTT spacer sequence CTCN PAM
auugcccucaagagcccugu

SEQ ID NO: 21547 - RNA, 20 nt, Artificial Sequence
  HTT spacer sequence CTCN PAM
ccauugcccucaagagcccu

SEQ ID NO: 21548 - RNA, 20 nt, Artificial Sequence
  HTT spacer sequence CTCN PAM
cgcccaccucuccauugccc

SEQ ID NO: 21549 - RNA, 20 nt, Artificial Sequence
  HTT spacer sequence CTCN PAM
agaugccagggccaggcccu

SEQ ID NO: 21550 - RNA, 20 nt, Artificial Sequence
  HTT spacer sequence CTCN PAM
uccugggcugcccuugguga

SEQ ID NO: 21551 - RNA, 20 nt, Artificial Sequence
  HTT spacer sequence GTCN PAM
uuagggcaauguuuuuuucu

SEQ ID NO: 21552 - RNA, 20 nt, Artificial Sequence
  HTT spacer sequence GTCN PAM
ccccaggaagccgguguaaa

SEQ ID NO: 21553 - RNA, 20 nt, Artificial Sequence
  HTT spacer sequence GTCN PAM
cugccacggguggguuuugc

SEQ ID NO: 21554 - RNA, 20 nt, Artificial Sequence
  HTT spacer sequence GTCN PAM
aaacugcauggcuggcucuc

SEQ ID NO: 21555 - RNA, 20 nt, Artificial Sequence
  HTT spacer sequence GTCN PAM
auggaggggcccccccacuu

SEQ ID NO: 21556 - RNA, 20 nt, Artificial Sequence
  HTT spacer sequence GTCN PAM
ccuacacccccugccucccu

SEQ ID NO: 21557 - RNA, 20 nt, Artificial Sequence
  HTT spacer sequence GTCN PAM
aaaaauauccauucacuuuu

SEQ ID NO: 21558 - RNA, 20 nt, Artificial Sequence
  HTT spacer sequence GTCN PAM
uccuccuucaaacacuugac

SEQ ID NO: 21559 - RNA, 20 nt, Artificial Sequence
  HTT spacer sequence GTCN PAM
aguguuugaaggaggaagac

SEQ ID NO: 21560 - RNA, 20 nt, Artificial Sequence
  HTT spacer sequence GTCN PAM
uuuuucaguuggauugcaaa

SEQ ID NO: 21561 - RNA, 20 nt, Artificial Sequence
  HTT spacer sequence GTCN PAM
cauuuggugaaacgauuacu

SEQ ID NO: 21562 - RNA, 20 nt, Artificial Sequence
  HTT spacer sequence GTCN PAM
ucggauuuuacaugaguccc

SEQ ID NO: 21563 - RNA, 20 nt, Artificial Sequence
  HTT spacer sequence GTCN PAM
agugccuuccugcaggaaag

SEQ ID NO: 21564 - RNA, 20 nt, Artificial Sequence
  HTT spacer sequence GTCN PAM
ccuuuccugcaggaaggcac

SEQ ID NO: 21565 - RNA, 20 nt, Artificial Sequence
  HTT spacer sequence GTCN PAM
ggcaaagucuccuuuccugc

SEQ ID NO: 21566 - RNA, 20 nt, Artificial Sequence
  HTT spacer sequence GTCN PAM
cgcggacaggaguguaaauc

SEQ ID NO: 21567 - RNA, 20 nt, Artificial Sequence
  HTT spacer sequence GTCN PAM
gcgggaccccagagcuggca

SEQ ID NO: 21568 - RNA, 20 nt, Artificial Sequence
  HTT spacer sequence GTCN PAM
ccuugcucgaaccucuacag

SEQ ID NO: 21569 - RNA, 20 nt, Artificial Sequence
  HTT spacer sequence GTCN PAM
ugagaccccauuuguaaaac

SEQ ID NO: 21570 - RNA, 20 nt, Artificial Sequence
  HTT spacer sequence GTCN PAM
caagacaagucaccuugcuc

SEQ ID NO: 21571 - RNA, 20 nt, Artificial Sequence
  HTT spacer sequence GTCN PAM
uuugugaacguuuaaacuau

SEQ ID NO: 21572 - RNA, 20 nt, Artificial Sequence
  HTT spacer sequence GTCN PAM
ucuccuagguccugggcauc

SEQ ID NO: 21573 - RNA, 20 nt, Artificial Sequence
  HTT spacer sequence GTCN PAM
ugggcauccagacaacaaau

SEQ ID NO: 21574 - RNA, 20 nt, Artificial Sequence
  HTT spacer sequence GTCN PAM
ggaugcccaggaccuaggag

SEQ ID NO: 21575 - RNA, 20 nt, Artificial Sequence
  HTT spacer sequence GTCN PAM
ucccauggccugugcccccc

SEQ ID NO: 21576 - RNA, 20 nt, Artificial Sequence
  HTT spacer sequence GTCN PAM
gacauggugaaccccauugc

SEQ ID NO: 21577 - RNA, 20 nt, Artificial Sequence
  HTT spacer sequence GTCN PAM
gacuggcccccaaaccucuc

SEQ ID NO: 21578 - RNA, 20 nt, Artificial Sequence
  HTT spacer sequence GTCN PAM
gcccugguccugacaaccau

SEQ ID NO: 21579 - RNA, 20 nt, Artificial Sequence
  HTT spacer sequence GTCN PAM
ugacaaccauagaggaggca

SEQ ID NO: 21580 - RNA, 20 nt, Artificial Sequence
  HTT spacer sequence GTCN PAM
ggaccagggcugacugcagc

SEQ ID NO: 21581 - RNA, 20 nt, Artificial Sequence
  HTT spacer sequence GTCN PAM
cccugaggaugaaggaugcg

SEQ ID NO: 21582 - RNA, 20 nt, Artificial Sequence
  HTT spacer sequence GTCN PAM
gggucuguucccagcaacca

SEQ ID NO: 21583 - RNA, 20 nt, Artificial Sequence
  HTT spacer sequence GTCN PAM
guucccagcaaccaaguacc

SEQ ID NO: 21584 - RNA, 20 nt, Artificial Sequence
  HTT spacer sequence GTCN PAM
cagugggggccugccacccc

SEQ ID NO: 21585 - RNA, 20 nt, Artificial Sequence
  HTT spacer sequence GTCN PAM
cagaggccaucacagcuucc

SEQ ID NO: 21586 - RNA, 20 nt, Artificial Sequence
  HTT spacer sequence GTCN PAM
guguuucuuggagucucaga

SEQ ID NO: 21587 - RNA, 20 nt, Artificial Sequence
  HTT spacer sequence GTCN PAM
ccgccugcuuacaccaccca

SEQ ID NO: 21588 - RNA, 20 nt, Artificial Sequence
  HTT spacer sequence GTCN PAM
auaauggcagaaccaguggg

SEQ ID NO: 21589 - RNA, 20 nt, Artificial Sequence
  HTT spacer sequence GTCN PAM
uugguugagcuguuacugug

SEQ ID NO: 21590 - RNA, 20 nt, Artificial Sequence
  HTT spacer sequence GTCN PAM
uggacagagaugaucuccuc

SEQ ID NO: 21591 - RNA, 20 nt, Artificial Sequence
  HTT spacer sequence GTCN PAM
aagacucacaguaacagcuc

SEQ ID NO: 21592 - RNA, 20 nt, Artificial Sequence
  HTT spacer sequence GTCN PAM
cagcauccccaccugacacu

SEQ ID NO: 21593 - RNA, 20 nt, Artificial Sequence
  HTT spacer sequence GTCN PAM
gguggggaugcugagaccug

SEQ ID NO: 21594 - RNA, 20 nt, Artificial Sequence
  HTT spacer sequence GTCN PAM
cucccacaccugugccucag

SEQ ID NO: 21595 - RNA, 20 nt, Artificial Sequence
  HTT spacer sequence GTCN PAM
aaauagcauuggagcuccag

SEQ ID NO: 21596 - RNA, 20 nt, Artificial Sequence
  HTT spacer sequence GTCN PAM
ugugucuaaauagcauugga

SEQ ID NO: 21597 - RNA, 20 nt, Artificial Sequence
  HTT spacer sequence GTCN PAM
ucagugguugccggucaugu

SEQ ID NO: 21598 - RNA, 20 nt, Artificial Sequence
  HTT spacer sequence GTCN PAM
acucaaacaaaaccacaccc

SEQ ID NO: 21599 - RNA, 20 nt, Artificial Sequence
  HTT spacer sequence GTCN PAM
cuuaccagcucucagaugug

SEQ ID NO: 21600 - RNA, 20 nt, Artificial Sequence
  HTT spacer sequence GTCN PAM
aacaaaaugaccuaaagaca

SEQ ID NO: 21601 - RNA, 20 nt, Artificial Sequence
  HTT spacer sequence GTCN PAM
uuuuguucgaccuuaagagg

SEQ ID NO: 21602 - RNA, 20 nt, Artificial Sequence
  HTT spacer sequence GTCN PAM
uuaggucauuuuguucgacc

SEQ ID NO: 21603 - RNA, 20 nt, Artificial Sequence
  HTT spacer sequence GTCN PAM
ugccccacaggcugaguguc

SEQ ID NO: 21604 - RNA, 20 nt, Artificial Sequence
  HTT spacer sequence GTCN PAM
gcccugccugcugaguccaa

SEQ ID NO: 21605 - RNA, 20 nt, Artificial Sequence
  HTT spacer sequence GTCN PAM
aaauaucaauuacgugaagc

SEQ ID NO: 21606 - RNA, 20 nt, Artificial Sequence
  HTT spacer sequence GTCN PAM
agagcuucacguaauugaua

SEQ ID NO: 21607 - RNA, 20 nt, Artificial Sequence
  HTT spacer sequence GTCN PAM
gaggcagagagucgagagcu

SEQ ID NO: 21608 - RNA, 20 nt, Artificial Sequence
  HTT spacer sequence GTCN PAM
gguaugguuucuguuaaaug

SEQ ID NO: 21609 - RNA, 20 nt, Artificial Sequence
  HTT spacer sequence GTCN PAM
ucacucagggcucuccuucc

SEQ ID NO: 21610 - RNA, 20 nt, Artificial Sequence
  HTT spacer sequence GTCN PAM
gcgcagggagugaugcucgc

SEQ ID NO: 21611 - RNA, 20 nt, Artificial Sequence
  HTT spacer sequence GTCN PAM
gcagcccaggcucuuaauug

SEQ ID NO: 21612 - RNA, 20 nt, Artificial Sequence
  HTT spacer sequence GTCN PAM
cacacucccccaaccacaaa

SEQ ID NO: 21613 - RNA, 20 nt, Artificial Sequence
  HTT spacer sequence GTCN PAM
cauuuccugcgcuuugcuga

SEQ ID NO: 21614 - RNA, 20 nt, Artificial Sequence
  HTT spacer sequence GTCN PAM
cuuccuaagaggccagggag

SEQ ID NO: 21615 - RNA, 20 nt, Artificial Sequence
  HTT spacer sequence GTCN PAM
gcacugcacucccgcugacc

SEQ ID NO: 21616 - RNA, 20 nt, Artificial Sequence
  HTT spacer sequence GTCN PAM
gcgggagugcagugcggacg

SEQ ID NO: 21617 - RNA, 20 nt, Artificial Sequence
  HTT spacer sequence GTCN PAM
ugccaccccucccagaaagc

SEQ ID NO: 21618 - RNA, 20 nt, Artificial Sequence
  HTT spacer sequence GTCN PAM
cucucagcugugugugguuc

SEQ ID NO: 21619 - RNA, 20 nt, Artificial Sequence
  HTT spacer sequence GTCN PAM
gagcaggcguggcuggcccu

SEQ ID NO: 21620 - RNA, 20 nt, Artificial Sequence
  HTT spacer sequence GTCN PAM
ucccaggacuuccugagccc

SEQ ID NO: 21621 - RNA, 20 nt, Artificial Sequence
  HTT spacer sequence GTCN PAM
ugggaggacgcuuggcagug

SEQ ID NO: 21622 - RNA, 20 nt, Artificial Sequence
  HTT spacer sequence GTCN PAM
uuggccuggcacguuucucu

SEQ ID NO: 21623 - RNA, 20 nt, Artificial Sequence
  HTT spacer sequence GTCN PAM
cuggaacagggucugugcuu

SEQ ID NO: 21624 - RNA, 20 nt, Artificial Sequence
  HTT spacer sequence GTCN PAM
gugcuuggcauggggcaugg

SEQ ID NO: 21625 - RNA, 20 nt, Artificial Sequence
  HTT spacer sequence GTCN PAM
augccccaugccaagcacag

SEQ ID NO: 21626 - RNA, 20 nt, Artificial Sequence
  HTT spacer sequence GTCN PAM
cuacagcacugcguccaugc

SEQ ID NO: 21627 - RNA, 20 nt, Artificial Sequence
  HTT spacer sequence GTCN PAM
ccugggaaacgaauggcugu

SEQ ID NO: 21628 - RNA, 20 nt, Artificial Sequence
  HTT spacer sequence GTCN PAM
aggcacaugccagugacugc

SEQ ID NO: 21629 - RNA, 20 nt, Artificial Sequence
  HTT spacer sequence GTCN PAM
cuggcaugugccuugacuuc

SEQ ID NO: 21630 - RNA, 20 nt, Artificial Sequence
  HTT spacer sequence GTCN PAM
accaagaccccucccacagc

SEQ ID NO: 21631 - RNA, 20 nt, Artificial Sequence
  HTT spacer sequence GTCN PAM
ugguggacacuggggccugg

SEQ ID NO: 21632 - RNA, 20 nt, Artificial Sequence
  HTT spacer sequence GTCN PAM
ucgccccucacccucagcca

SEQ ID NO: 21633 - RNA, 20 nt, Artificial Sequence
  HTT spacer sequence GTCN PAM
uccuuuuggggcuccccacu

SEQ ID NO: 21634 - RNA, 20 nt, Artificial Sequence
  HTT spacer sequence GTCN PAM
cgaagugcagagaugaggcg

SEQ ID NO: 21635 - RNA, 20 nt, Artificial Sequence
  HTT spacer sequence GTCN PAM
ggauauaucuguuugguccc

SEQ ID NO: 21636 - RNA, 20 nt, Artificial Sequence
  HTT spacer sequence GTCN PAM
ugggcccuugaagagagcug

SEQ ID NO: 21637 - RNA, 20 nt, Artificial Sequence
  HTT spacer sequence GTCN PAM
ccugaggguuuucgggguuc

SEQ ID NO: 21638 - RNA, 20 nt, Artificial Sequence
  HTT spacer sequence GTCN PAM
cauacucaguacugcucagu

SEQ ID NO: 21639 - RNA, 20 nt, Artificial Sequence
  HTT spacer sequence GTCN PAM
uggcagguucccacaaaaca

SEQ ID NO: 21640 - RNA, 20 nt, Artificial Sequence
  HTT spacer sequence GTCN PAM
gccugggugccaaccccacu

SEQ ID NO: 21641 - RNA, 20 nt, Artificial Sequence
  HTT spacer sequence GTCN PAM
ucuuucauaaagcacacaca

SEQ ID NO: 21642 - RNA, 20 nt, Artificial Sequence
  HTT spacer sequence GTCN PAM
cucaggcuucucuuggcaaa

SEQ ID NO: 21643 - RNA, 20 nt, Artificial Sequence
  HTT spacer sequence GTCN PAM
ucgcuaaucugggccuggaa

SEQ ID NO: 21644 - RNA, 20 nt, Artificial Sequence
  HTT spacer sequence GTCN PAM
ccccgcuuuguaggagaaca

SEQ ID NO: 21645 - RNA, 20 nt, Artificial Sequence
  HTT spacer sequence GTCN PAM
gggggugcagacaagcgagc

SEQ ID NO: 21646 - RNA, 20 nt, Artificial Sequence
  HTT spacer sequence GTCN PAM
gcacccccagaccguuuuca

SEQ ID NO: 21647 - RNA, 20 nt, Artificial Sequence
  HTT spacer sequence GTCN PAM
auuccuccucaaagauggaa

SEQ ID NO: 21648 - RNA, 20 nt, Artificial Sequence
  HTT spacer sequence GTCN PAM
agguaaguguccaggucccu

SEQ ID NO: 21649 - RNA, 20 nt, Artificial Sequence
  HTT spacer sequence GTCN PAM
aggucccucucccccaugcc

SEQ ID NO: 21650 - RNA, 20 nt, Artificial Sequence
  HTT spacer sequence GTCN PAM
cucucccccaugccgggaau

SEQ ID NO: 21651 - RNA, 20 nt, Artificial Sequence
  HTT spacer sequence GTCN PAM
cuaggaggugagaauucccg

SEQ ID NO: 21652 - RNA, 20 nt, Artificial Sequence
  HTT spacer sequence GTCN PAM
aucaauagaaagucauaacc

SEQ ID NO: 21653 - RNA, 20 nt, Artificial Sequence
  HTT spacer sequence GTCN PAM
uaaccaagcaagaaacacag

SEQ ID NO: 21654 - RNA, 20 nt, Artificial Sequence
  HTT spacer sequence GTCN PAM
cagugcuguguuucuugcuu

SEQ ID NO: 21655 - RNA, 20 nt, Artificial Sequence
  HTT spacer sequence GTCN PAM
ucaucugaaacaaaagucuc

SEQ ID NO: 21656 - RNA, 20 nt, Artificial Sequence
  HTT spacer sequence GTCN PAM
uuucaagagaguuuaugcuu

SEQ ID NO: 21657 - RNA, 20 nt, Artificial Sequence
  HTT spacer sequence GTCN PAM
ugcuuuauugauguugguga

SEQ ID NO: 21658 - RNA, 20 nt, Artificial Sequence
  HTT spacer sequence GTCN PAM
gcuuguccugcuuuauugau

SEQ ID NO: 21659 - RNA, 20 nt, Artificial Sequence
  HTT spacer sequence GTCN PAM
cuuccugggaguguucaaag

SEQ ID NO: 21660 - RNA, 20 nt, Artificial Sequence
  HTT spacer sequence GTCN PAM
ggauaauacuuacaagaucu

SEQ ID NO: 21661 - RNA, 20 nt, Artificial Sequence
  HTT spacer sequence GTCN PAM
uuuaaacaccaauaugauuu

SEQ ID NO: 21662 - RNA, 20 nt, Artificial Sequence
  HTT spacer sequence GTCN PAM
uuuuaauguuaaacuuuugu

SEQ ID NO: 21663 - RNA, 20 nt, Artificial Sequence
  HTT spacer sequence GTCN PAM
cccaggcuugagugcagugg

SEQ ID NO: 21664 - RNA, 20 nt, Artificial Sequence
  HTT spacer sequence GTCN PAM
ugcucugucgcccaggcuug

SEQ ID NO: 21665 - RNA, 20 nt, Artificial Sequence
  HTT spacer sequence GTCN PAM
caaaaaaaaaaaaaaagaaa

SEQ ID NO: 21666 - RNA, 20 nt, Artificial Sequence
  HTT spacer sequence GTCN PAM
cacucuguugcccaggcuag

SEQ ID NO: 21667 - RNA, 20 nt, Artificial Sequence
  HTT spacer sequence GTCN PAM
cagcuacucaggaggauaau

SEQ ID NO: 21668 - RNA, 20 nt, Artificial Sequence
  HTT spacer sequence GTCN PAM
gguggugguggugauuuuuu

SEQ ID NO: 21669 - RNA, 20 nt, Artificial Sequence
  HTT spacer sequence GTCN PAM
cuacaaaaauauuaaaaaau

SEQ ID NO: 21670 - RNA, 20 nt, Artificial Sequence
  HTT spacer sequence GTCN PAM
cacugugaugcccaggcugg

SEQ ID NO: 21671 - RNA, 20 nt, Artificial Sequence
  HTT spacer sequence GTCN PAM
ugaacuccugggcucaagca

SEQ ID NO: 21672 - RNA, 20 nt, Artificial Sequence
  HTT spacer sequence GTCN PAM
cccaccucagccucccaaag

SEQ ID NO: 21673 - RNA, 20 nt, Artificial Sequence
  HTT spacer sequence GTCN PAM
ucaaaacaaaacaaagcugg

SEQ ID NO: 21674 - RNA, 20 nt, Artificial Sequence
  HTT spacer sequence GTCN PAM
uacucccaauuaaccugggg

SEQ ID NO: 21675 - RNA, 20 nt, Artificial Sequence
  HTT spacer sequence GTCN PAM
gguuaaccuuuauaagaucu

SEQ ID NO: 21676 - RNA, 20 nt, Artificial Sequence
  HTT spacer sequence GTCN PAM
uugggagacccggggaccag

SEQ ID NO: 21677 - RNA, 20 nt, Artificial Sequence
  HTT spacer sequence GTCN PAM
cccaaugacugcagaucuua

SEQ ID NO: 21678 - RNA, 20 nt, Artificial Sequence
  HTT spacer sequence GTCN PAM
ccgggucucccaaugacugc

SEQ ID NO: 21679 - RNA, 20 nt, Artificial Sequence
  HTT spacer sequence GTCN PAM
cccuuuuaccuaucagcucu

SEQ ID NO: 21680 - RNA, 20 nt, Artificial Sequence
  HTT spacer sequence GTCN PAM
uagguucuggucucucagau

SEQ ID NO: 21681 - RNA, 20 nt, Artificial Sequence
  HTT spacer sequence GTCN PAM
cucagaucuacuggucaguu

SEQ ID NO: 21682 - RNA, 20 nt, Artificial Sequence
  HTT spacer sequence GTCN PAM
guuugaucaguggauuuauc

SEQ ID NO: 21683 - RNA, 20 nt, Artificial Sequence
  HTT spacer sequence GTCN PAM
ucaguguugucagccacaaa

SEQ ID NO: 21684 - RNA, 20 nt, Artificial Sequence
  HTT spacer sequence GTCN PAM
gccacaaaauaacugcuuug

SEQ ID NO: 21685 - RNA, 20 nt, Artificial Sequence
  HTT spacer sequence GTCN PAM
aaagcaguuauuuuguggcu

SEQ ID NO: 21686 - RNA, 20 nt, Artificial Sequence
  HTT spacer sequence GTCN PAM
aagugccaguuuaugaauuu

SEQ ID NO: 21687 - RNA, 20 nt, Artificial Sequence
  HTT spacer sequence GTCN PAM
caguguaaauucauaaacug

SEQ ID NO: 21688 - RNA, 20 nt, Artificial Sequence
  HTT spacer sequence GTCN PAM
cugaggauaaggggcaucug

SEQ ID NO: 21689 - RNA, 20 nt, Artificial Sequence
  HTT spacer sequence GTCN PAM
cccugaacacacgauccauc

SEQ ID NO: 21690 - RNA, 20 nt, Artificial Sequence
  HTT spacer sequence GTCN PAM
uggcggaacugguaaggaag

SEQ ID NO: 21691 - RNA, 20 nt, Artificial Sequence
  HTT spacer sequence GTCN PAM
aauaguuugagugcacugcu

SEQ ID NO: 21692 - RNA, 20 nt, Artificial Sequence
  HTT spacer sequence GTCN PAM
gaacaucagggaacccucua

SEQ ID NO: 21693 - RNA, 20 nt, Artificial Sequence
  HTT spacer sequence GTCN PAM
cagcuacugggaaggcugag

SEQ ID NO: 21694 - RNA, 20 nt, Artificial Sequence
  HTT spacer sequence GTCN PAM
cacuauguugcccaggcuug

SEQ ID NO: 21695 - RNA, 20 nt, Artificial Sequence
  HTT spacer sequence GTCN PAM
ucuucaaaaaagaaaaaaag

SEQ ID NO: 21696 - RNA, 20 nt, Artificial Sequence
  HTT spacer sequence GTCN PAM
uuuuuucuuuuuugaagaag

SEQ ID NO: 21697 - RNA, 20 nt, Artificial Sequence
  HTT spacer sequence GTCN PAM
cucacugcaucuuaccgcau

SEQ ID NO: 21698 - RNA, 20 nt, Artificial Sequence
  HTT spacer sequence GTCN PAM
cgaggugugagugucuuuga

SEQ ID NO: 21699 - RNA, 20 nt, Artificial Sequence
  HTT spacer sequence GTCN PAM
uugauuuuuacuggauaaau

SEQ ID NO: 21700 - RNA, 20 nt, Artificial Sequence
  HTT spacer sequence GTCN PAM
ggcauuuauccaguaaaaau

SEQ ID NO: 21701 - RNA, 20 nt, Artificial Sequence
  HTT spacer sequence GTCN PAM
cuacuaaaaauacaaaaaau

SEQ ID NO: 21702 - RNA, 20 nt, Artificial Sequence
  HTT spacer sequence GTCN PAM
cgaucuccugaccuugugau

SEQ ID NO: 21703 - RNA, 20 nt, Artificial Sequence
  HTT spacer sequence GTCN PAM
ggagaucgagaccacccggc

SEQ ID NO: 21704 - RNA, 20 nt, Artificial Sequence
  HTT spacer sequence GTCN PAM
cucacgcuuguaaucccagc

SEQ ID NO: 21705 - RNA, 20 nt, Artificial Sequence
  HTT spacer sequence GTCN PAM
cagccucccgaguagcuggg

SEQ ID NO: 21706 - RNA, 20 nt, Artificial Sequence
  HTT spacer sequence GTCN PAM
ggcuggucuugaacgccuga

SEQ ID NO: 21707 - RNA, 20 nt, Artificial Sequence
  HTT spacer sequence GTCN PAM
ugaacgccugaucucaggug

SEQ ID NO: 21708 - RNA, 20 nt, Artificial Sequence
  HTT spacer sequence GTCN PAM
gccuuggccucccaaagugc

SEQ ID NO: 21709 - RNA, 20 nt, Artificial Sequence
  HTT spacer sequence GTCN PAM
uuuuuuuguuguuguugaug

SEQ ID NO: 21710 - RNA, 20 nt, Artificial Sequence
  HTT spacer sequence GTCN PAM
uagcugcuugggaggcugag

SEQ ID NO: 21711 - RNA, 20 nt, Artificial Sequence
  HTT spacer sequence GTCN PAM
cacucugccacccaggcugg

SEQ ID NO: 21712 - RNA, 20 nt, Artificial Sequence
  HTT spacer sequence GTCN PAM
ugaacucccaaccucaagug

SEQ ID NO: 21713 - RNA, 20 nt, Artificial Sequence
  HTT spacer sequence GTCN PAM
uuuuaguagagaugggguuu

SEQ ID NO: 21714 - RNA, 20 nt, Artificial Sequence
  HTT spacer sequence GTCN PAM
cugcaaccucucccuccugg

SEQ ID NO: 21715 - RNA, 20 nt, Artificial Sequence
  HTT spacer sequence GTCN PAM
caaaaaaaaaaauauauaua

SEQ ID NO: 21716 - RNA, 20 nt, Artificial Sequence
  HTT spacer sequence GTCN PAM
ugaaaauguuucccuuuacc

SEQ ID NO: 21717 - RNA, 20 nt, Artificial Sequence
  HTT spacer sequence GTCN PAM
ugaggauauuauccaucauc

SEQ ID NO: 21718 - RNA, 20 nt, Artificial Sequence
  HTT spacer sequence GTCN PAM
auaauuaaagaauugauuuu

SEQ ID NO: 21719 - RNA, 20 nt, Artificial Sequence
  HTT spacer sequence GTCN PAM
guguaucauaccuugauucu

SEQ ID NO: 21720 - RNA, 20 nt, Artificial Sequence
  HTT spacer sequence GTCN PAM
acuuuucuauccuugagcgg

SEQ ID NO: 21721 - RNA, 20 nt, Artificial Sequence
  HTT spacer sequence GTCN PAM
ugcucuguugcccaggcugg

SEQ ID NO: 21722 - RNA, 20 nt, Artificial Sequence
  HTT spacer sequence GTCN PAM
cagccacucaggaggcugag

SEQ ID NO: 21723 - RNA, 20 nt, Artificial Sequence
  HTT spacer sequence GTCN PAM
cuacaaaaaauuuaaaaaua

SEQ ID NO: 21724 - RNA, 20 nt, Artificial Sequence
  HTT spacer sequence GTCN PAM
cccucuguugcucaggcggu

SEQ ID NO: 21725 - RNA, 20 nt, Artificial Sequence
  HTT spacer sequence GTCN PAM
ugaacuccugggcucaagca

SEQ ID NO: 21726 - RNA, 20 nt, Artificial Sequence
  HTT spacer sequence GTCN PAM
gcugccaugcucagccuagu

SEQ ID NO: 21727 - RNA, 20 nt, Artificial Sequence
  HTT spacer sequence GTCN PAM
guuuguguugcuauaaggaa

SEQ ID NO: 21728 - RNA, 20 nt, Artificial Sequence
  HTT spacer sequence GTCN PAM
ucuucaccuugugccguaag

SEQ ID NO: 21729 - RNA, 20 nt, Artificial Sequence
  HTT spacer sequence GTCN PAM
agaugacaugaugagagaaa

SEQ ID NO: 21730 - RNA, 20 nt, Artificial Sequence
  HTT spacer sequence GTCN PAM
ucuggacacacuggguccuc

SEQ ID NO: 21731 - RNA, 20 nt, Artificial Sequence
  HTT spacer sequence GTCN PAM
uuccagcacugagugaguuc

SEQ ID NO: 21732 - RNA, 20 nt, Artificial Sequence
  HTT spacer sequence GTCN PAM
cucaugaauggcuuggugcu

SEQ ID NO: 21733 - RNA, 20 nt, Artificial Sequence
  HTT spacer sequence GTCN PAM
ugagggcaggucccucauga

SEQ ID NO: 21734 - RNA, 20 nt, Artificial Sequence
  HTT spacer sequence GTCN PAM
cagcugcucaggagucugag

SEQ ID NO: 21735 - RNA, 20 nt, Artificial Sequence
  HTT spacer sequence GTCN PAM
gaggugaaaggaucgcuuga

SEQ ID NO: 21736 - RNA, 20 nt, Artificial Sequence
  HTT spacer sequence GTCN PAM
cgaacuucugggcucaagcg

SEQ ID NO: 21737 - RNA, 20 nt, Artificial Sequence
  HTT spacer sequence GTCN PAM
ccaggcuagucucgaacuuc

SEQ ID NO: 21738 - RNA, 20 nt, Artificial Sequence
  HTT spacer sequence GTCN PAM
cugcuaaaaauacaaaaauu

SEQ ID NO: 21739 - RNA, 20 nt, Artificial Sequence
  HTT spacer sequence GTCN PAM
gccaaguagcuggaacuaca

SEQ ID NO: 21740 - RNA, 20 nt, Artificial Sequence
  HTT spacer sequence GTCN PAM
agccuaggcaacagagugac

SEQ ID NO: 21741 - RNA, 20 nt, Artificial Sequence
  HTT spacer sequence GTCN PAM
cucuguugccuaggcuggac

SEQ ID NO: 21742 - RNA, 20 nt, Artificial Sequence
  HTT spacer sequence GTCN PAM
caaaauauguaaauaaaaga

SEQ ID NO: 21743 - RNA, 20 nt, Artificial Sequence
  HTT spacer sequence GTCN PAM
accccagcucuuucuuuuca

SEQ ID NO: 21744 - RNA, 20 nt, Artificial Sequence
  HTT spacer sequence GTCN PAM
cccacucugaagaaacacaa

SEQ ID NO: 21745 - RNA, 20 nt, Artificial Sequence
  HTT spacer sequence GTCN PAM
ucuucucauaucaucacuuu

SEQ ID NO: 21746 - RNA, 20 nt, Artificial Sequence
  HTT spacer sequence GTCN PAM
ucaaguggcgacaggguggg

SEQ ID NO: 21747 - RNA, 20 nt, Artificial Sequence
  HTT spacer sequence GTCN PAM
ccacuugaggaccacugauu

SEQ ID NO: 21748 - RNA, 20 nt, Artificial Sequence
  HTT spacer sequence GTCN PAM
gguugugaagagcuaguugg

SEQ ID NO: 21749 - RNA, 20 nt, Artificial Sequence
  HTT spacer sequence GTCN PAM
uccaacuagcucuucacaac

SEQ ID NO: 21750 - RNA, 20 nt, Artificial Sequence
  HTT spacer sequence GTCN PAM
gcggaugugugggagcugug

SEQ ID NO: 21751 - RNA, 20 nt, Artificial Sequence
  HTT spacer sequence GTCN PAM
gugaauacccaucuuccuuu

SEQ ID NO: 21752 - RNA, 20 nt, Artificial Sequence
  HTT spacer sequence GTCN PAM
augucccuguucuucccucc

SEQ ID NO: 21753 - RNA, 20 nt, Artificial Sequence
  HTT spacer sequence GTCN PAM
cuguucuucccuccugggca

SEQ ID NO: 21754 - RNA, 20 nt, Artificial Sequence
  HTT spacer sequence GTCN PAM
augcggagcagggugcccag

SEQ ID NO: 21755 - RNA, 20 nt, Artificial Sequence
  HTT spacer sequence GTCN PAM
cugagccuaaugauggaagu

SEQ ID NO: 21756 - RNA, 20 nt, Artificial Sequence
  HTT spacer sequence GTCN PAM
ugccgugaaaguucuggugc

SEQ ID NO: 21757 - RNA, 20 nt, Artificial Sequence
  HTT spacer sequence GTCN PAM
ucuccucaucuuuugacuua

SEQ ID NO: 21758 - RNA, 20 nt, Artificial Sequence
  HTT spacer sequence GTCN PAM
ccucaucuuuugacuuacau

SEQ ID NO: 21759 - RNA, 20 nt, Artificial Sequence
  HTT spacer sequence GTCN PAM
aaagaugaggagacgacuua

SEQ ID NO: 21760 - RNA, 20 nt, Artificial Sequence
  HTT spacer sequence GTCN PAM
auguaagucaaaagaugagg

SEQ ID NO: 21761 - RNA, 20 nt, Artificial Sequence
  HTT spacer sequence GTCN PAM
ucagccuggugacuuagcuu

SEQ ID NO: 21762 - RNA, 20 nt, Artificial Sequence
  HTT spacer sequence GTCN PAM
ccaggcugaugacuaaaaau

SEQ ID NO: 21763 - RNA, 20 nt, Artificial Sequence
  HTT spacer sequence GTCN PAM
cuggcuagccucugguuugg

SEQ ID NO: 21764 - RNA, 20 nt, Artificial Sequence
  HTT spacer sequence GTCN PAM
uugggucagaugccucccug

SEQ ID NO: 21765 - RNA, 20 nt, Artificial Sequence
  HTT spacer sequence GTCN PAM
gaugccucccugcugccagg

SEQ ID NO: 21766 - RNA, 20 nt, Artificial Sequence
  HTT spacer sequence GTCN PAM
gaugauggggaccuccccau

SEQ ID NO: 21767 - RNA, 20 nt, Artificial Sequence
  HTT spacer sequence GTCN PAM
ccaucaucagacccucaucc

SEQ ID NO: 21768 - RNA, 20 nt, Artificial Sequence
  HTT spacer sequence GTCN PAM
cccacaccucugcugauggg

SEQ ID NO: 21769 - RNA, 20 nt, Artificial Sequence
  HTT spacer sequence GTCN PAM
ggugugcaaauggcuacuuu

SEQ ID NO: 21770 - RNA, 20 nt, Artificial Sequence
  HTT spacer sequence GTCN PAM
cuuaauuuugagaugcuacc

SEQ ID NO: 21771 - RNA, 20 nt, Artificial Sequence
  HTT spacer sequence GTCN PAM
cugaauaaaagccacuuuca

SEQ ID NO: 21772 - RNA, 20 nt, Artificial Sequence
  HTT spacer sequence GTCN PAM
uuucuggguauugcuguaaa

SEQ ID NO: 21773 - RNA, 20 nt, Artificial Sequence
  HTT spacer sequence GTCN PAM
uuacagcaauacccagaaau

SEQ ID NO: 21774 - RNA, 20 nt, Artificial Sequence
  HTT spacer sequence GTCN PAM
uuuugcauaagguauuaaca

SEQ ID NO: 21775 - RNA, 20 nt, Artificial Sequence
  HTT spacer sequence GTCN PAM
ugaaaaaucacaguaaccag

SEQ ID NO: 21776 - RNA, 20 nt, Artificial Sequence
  HTT spacer sequence GTCN PAM
aauaaaaaguugguaucaaa

SEQ ID NO: 21777 - RNA, 20 nt, Artificial Sequence
  HTT spacer sequence GTCN PAM
gcugcuauuaauaaauucaa

SEQ ID NO: 21778 - RNA, 20 nt, Artificial Sequence
  HTT spacer sequence GTCN PAM
cuacauucaggcuccauaca

SEQ ID NO: 21779 - RNA, 20 nt, Artificial Sequence
  HTT spacer sequence GTCN PAM
caugacagagcagggauaug

SEQ ID NO: 21780 - RNA, 20 nt, Artificial Sequence
  HTT spacer sequence GTCN PAM
ugggacagcacaaauaucua

SEQ ID NO: 21781 - RNA, 20 nt, Artificial Sequence
  HTT spacer sequence GTCN PAM
ggaugccagggcaaguuuca

SEQ ID NO: 21782 - RNA, 20 nt, Artificial Sequence
  HTT spacer sequence GTCN PAM
auuaaauaauauaauuacua

SEQ ID NO: 21783 - RNA, 20 nt, Artificial Sequence
  HTT spacer sequence GTCN PAM
uaaggaaaacuguuauauua

SEQ ID NO: 21784 - RNA, 20 nt, Artificial Sequence
  HTT spacer sequence GTCN PAM
cuguugaauuuuauugaguu

SEQ ID NO: 21785 - RNA, 20 nt, Artificial Sequence
  HTT spacer sequence GTCN PAM
cuaaaauaccugugcccuuu

SEQ ID NO: 21786 - RNA, 20 nt, Artificial Sequence
  HTT spacer sequence GTCN PAM
agggaacacuguuaugugua

SEQ ID NO: 21787 - RNA, 20 nt, Artificial Sequence
  HTT spacer sequence GTCN PAM
ggaauuugagaucagccuga

SEQ ID NO: 21788 - RNA, 20 nt, Artificial Sequence
  HTT spacer sequence GTCN PAM
ggcugaucucaaauuccuga

SEQ ID NO: 21789 - RNA, 20 nt, Artificial Sequence
  HTT spacer sequence GTCN PAM
gucaggcugaucucaaauuc

SEQ ID NO: 21790 - RNA, 20 nt, Artificial Sequence
  HTT spacer sequence GTCN PAM
cgcucuguugcccaggcugg

SEQ ID NO: 21791 - RNA, 20 nt, Artificial Sequence
  HTT spacer sequence GTCN PAM
caaaaaaaaaaaaaaagaaa

SEQ ID NO: 21792 - RNA, 20 nt, Artificial Sequence
  HTT spacer sequence GTCN PAM
ggagaucgagaccauccugg

SEQ ID NO: 21793 - RNA, 20 nt, Artificial Sequence
  HTT spacer sequence GTCN PAM
cgaucuccugaccucgugau

SEQ ID NO: 21794 - RNA, 20 nt, Artificial Sequence
  HTT spacer sequence GTCN PAM
cuacuaacaacgccugucug

SEQ ID NO: 21795 - RNA, 20 nt, Artificial Sequence
  HTT spacer sequence GTCN PAM
gggcgugguggcuccugccu

SEQ ID NO: 21796 - RNA, 20 nt, Artificial Sequence
  HTT spacer sequence GTCN PAM
cagcuacuugggaggcugag

SEQ ID NO: 21797 - RNA, 20 nt, Artificial Sequence
  HTT spacer sequence GTCN PAM
ccaggcuggaaugcaguggc

SEQ ID NO: 21798 - RNA, 20 nt, Artificial Sequence
  HTT spacer sequence GTCN PAM
cgcucugucaccaggcugga

SEQ ID NO: 21799 - RNA, 20 nt, Artificial Sequence
  HTT spacer sequence GTCN PAM
ugccuaccucaaucacaauu

SEQ ID NO: 21800 - RNA, 20 nt, Artificial Sequence
  HTT spacer sequence GTCN PAM
aaaucaauaauacacacuuu

SEQ ID NO: 21801 - RNA, 20 nt, Artificial Sequence
  HTT spacer sequence GTCN PAM
aguccaaaucaauaauacac

SEQ ID NO: 21802 - RNA, 20 nt, Artificial Sequence
  HTT spacer sequence GTCN PAM
auaaugcacccagcaaccag

SEQ ID NO: 21803 - RNA, 20 nt, Artificial Sequence
  HTT spacer sequence GTCN PAM
aaugggaagauggacaugug

SEQ ID NO: 21804 - RNA, 20 nt, Artificial Sequence
  HTT spacer sequence GTCN PAM
aucuucccauuagacacuca

SEQ ID NO: 21805 - RNA, 20 nt, Artificial Sequence
  HTT spacer sequence GTCN PAM
auaggaaguguagaaguugg

SEQ ID NO: 21806 - RNA, 20 nt, Artificial Sequence
  HTT spacer sequence GTCN PAM
ggagaucgagaccauccugg

SEQ ID NO: 21807 - RNA, 20 nt, Artificial Sequence
  HTT spacer sequence GTCN PAM
cgaucuccugaccucgugau

SEQ ID NO: 21808 - RNA, 20 nt, Artificial Sequence
  HTT spacer sequence GTCN PAM
cuacuaaaaauacaaaaaau

SEQ ID NO: 21809 - RNA, 20 nt, Artificial Sequence
  HTT spacer sequence GTCN PAM
cagagcaagacucccucuca

SEQ ID NO: 21810 - RNA, 20 nt, Artificial Sequence
  HTT spacer sequence GTCN PAM
ugcucugugacccaggcugg

SEQ ID NO: 21811 - RNA, 20 nt, Artificial Sequence
  HTT spacer sequence GTCN PAM
cacgcagcuaauuacuacaa

SEQ ID NO: 21812 - RNA, 20 nt, Artificial Sequence
  HTT spacer sequence GTCN PAM
uguaaaggaaaggcggggag

SEQ ID NO: 21813 - RNA, 20 nt, Artificial Sequence
  HTT spacer sequence GTCN PAM
guguguucuugcaaaaucac

SEQ ID NO: 21814 - RNA, 20 nt, Artificial Sequence
  HTT spacer sequence GTCN PAM
uuagcaaaggaucaagcagg

SEQ ID NO: 21815 - RNA, 20 nt, Artificial Sequence
  HTT spacer sequence GTCN PAM
uagguacagugugagggggu

SEQ ID NO: 21816 - RNA, 20 nt, Artificial Sequence
  HTT spacer sequence GTCN PAM
aaacccccucacacuguacc

SEQ ID NO: 21817 - RNA, 20 nt, Artificial Sequence
  HTT spacer sequence GTCN PAM
gcuccccacaugcccuccau

SEQ ID NO: 21818 - RNA, 20 nt, Artificial Sequence
  HTT spacer sequence GTCN PAM
gcaggagguggcagcgucac

SEQ ID NO: 21819 - RNA, 20 nt, Artificial Sequence
  HTT spacer sequence GTCN PAM
ccagcacggggccuuuguug

SEQ ID NO: 21820 - RNA, 20 nt, Artificial Sequence
  HTT spacer sequence GTCN PAM
ccugcauuagccuucauagg

SEQ ID NO: 21821 - RNA, 20 nt, Artificial Sequence
  HTT spacer sequence GTCN PAM
aaucuggguugugcugcugu

SEQ ID NO: 21822 - RNA, 20 nt, Artificial Sequence
  HTT spacer sequence GTCN PAM
ucuuaggguaaaaacacagu

SEQ ID NO: 21823 - RNA, 20 nt, Artificial Sequence
  HTT spacer sequence GTCN PAM
uuuaugauacacacacaccu

SEQ ID NO: 21824 - RNA, 20 nt, Artificial Sequence
  HTT spacer sequence GTCN PAM
cugggugguagaaaaucagu

SEQ ID NO: 21825 - RNA, 20 nt, Artificial Sequence
  HTT spacer sequence GTCN PAM
guauucuccuaugcaaaaau

SEQ ID NO: 21826 - RNA, 20 nt, Artificial Sequence
  HTT spacer sequence GTCN PAM
cuuacauggauauauauaca

SEQ ID NO: 21827 - RNA, 20 nt, Artificial Sequence
  HTT spacer sequence GTCN PAM
acuaaaaauacaaaaaauua

SEQ ID NO: 21828 - RNA, 20 nt, Artificial Sequence
  HTT spacer sequence GTCN PAM
ugaacuccugaccucuugau

SEQ ID NO: 21829 - RNA, 20 nt, Artificial Sequence
  HTT spacer sequence GTCN PAM
ggaguucaagaccagccugg

SEQ ID NO: 21830 - RNA, 20 nt, Artificial Sequence
  HTT spacer sequence GTCN PAM
caaacagugaaacaaaggac

SEQ ID NO: 21831 - RNA, 20 nt, Artificial Sequence
  HTT spacer sequence GTCN PAM
uuuguuucacuguuugagac

SEQ ID NO: 21832 - RNA, 20 nt, Artificial Sequence
  HTT spacer sequence GTCN PAM
ugccugccugugggccaaug

SEQ ID NO: 21833 - RNA, 20 nt, Artificial Sequence
  HTT spacer sequence GTCN PAM
gaaggcuaggacuuggagag

SEQ ID NO: 21834 - RNA, 20 nt, Artificial Sequence
  HTT spacer sequence GTCN PAM
uagccuucagacucucucca

SEQ ID NO: 21835 - RNA, 20 nt, Artificial Sequence
  HTT spacer sequence GTCN PAM
ggguagcucuccaaguccua

SEQ ID NO: 21836 - RNA, 20 nt, Artificial Sequence
  HTT spacer sequence GTCN PAM
gaggaucuccuugauugagg

SEQ ID NO: 21837 - RNA, 20 nt, Artificial Sequence
  HTT spacer sequence GTCN PAM
caacucagccuccucaauca

SEQ ID NO: 21838 - RNA, 20 nt, Artificial Sequence
  HTT spacer sequence GTCN PAM
cgcuccucacuuccagggug

SEQ ID NO: 21839 - RNA, 20 nt, Artificial Sequence
  HTT spacer sequence GTCN PAM
ugcagguuguaagauuuucc

SEQ ID NO: 21840 - RNA, 20 nt, Artificial Sequence
  HTT spacer sequence GTCN PAM
uuucagggcuuguaggcucu

SEQ ID NO: 21841 - RNA, 20 nt, Artificial Sequence
  HTT spacer sequence GTCN PAM
gguccuuucagggcuuguag

SEQ ID NO: 21842 - RNA, 20 nt, Artificial Sequence
  HTT spacer sequence GTCN PAM
ugggccauaggaggguuguu

SEQ ID NO: 21843 - RNA, 20 nt, Artificial Sequence
  HTT spacer sequence GTCN PAM
ggugcuggguauuuuuucau

SEQ ID NO: 21844 - RNA, 20 nt, Artificial Sequence
  HTT spacer sequence GTCN PAM
cuagcucuucuccuccucuc

SEQ ID NO: 21845 - RNA, 20 nt, Artificial Sequence
  HTT spacer sequence GTCN PAM
aagcugcugcugucuggcuc

SEQ ID NO: 21846 - RNA, 20 nt, Artificial Sequence
  HTT spacer sequence GTCN PAM
ggcuccugaacugcagauag

SEQ ID NO: 21847 - RNA, 20 nt, Artificial Sequence
  HTT spacer sequence GTCN PAM
uuucuucccauugucccauc

SEQ ID NO: 21848 - RNA, 20 nt, Artificial Sequence
  HTT spacer sequence GTCN PAM
caucccaucucucucugcac

SEQ ID NO: 21849 - RNA, 20 nt, Artificial Sequence
  HTT spacer sequence GTCN PAM
cuccuugacuucaguggccc

SEQ ID NO: 21850 - RNA, 20 nt, Artificial Sequence
  HTT spacer sequence GTCN PAM
aggagugacucugaggcugc

SEQ ID NO: 21851 - RNA, 20 nt, Artificial Sequence
  HTT spacer sequence GTCN PAM
gccccaugccagccacuggg

SEQ ID NO: 21852 - RNA, 20 nt, Artificial Sequence
  HTT spacer sequence GTCN PAM
gcuucgggggucuccucaag

SEQ ID NO: 21853 - RNA, 20 nt, Artificial Sequence
  HTT spacer sequence GTCN PAM
ccucaaggaggcccucacug

SEQ ID NO: 21854 - RNA, 20 nt, Artificial Sequence
  HTT spacer sequence GTCN PAM
accggguuaaaggguacaga

SEQ ID NO: 21855 - RNA, 20 nt, Artificial Sequence
  HTT spacer sequence GTCN PAM
uauuuauugccuuugucuuu

SEQ ID NO: 21856 - RNA, 20 nt, Artificial Sequence
  HTT spacer sequence GTCN PAM
uugacaguuuucuucaccau

SEQ ID NO: 21857 - RNA, 20 nt, Artificial Sequence
  HTT spacer sequence GTCN PAM
aagacaaaggcaauaaauaa

SEQ ID NO: 21858 - RNA, 20 nt, Artificial Sequence
  HTT spacer sequence GTCN PAM
aggcacugagggcacaaugg

SEQ ID NO: 21859 - RNA, 20 nt, Artificial Sequence
  HTT spacer sequence GTCN PAM
cugagcaugugaugggcuca

SEQ ID NO: 21860 - RNA, 20 nt, Artificial Sequence
  HTT spacer sequence GTCN PAM
uccaggauuuacugagccca

SEQ ID NO: 21861 - RNA, 20 nt, Artificial Sequence
  HTT spacer sequence GTCN PAM
uuucuggcucuuaacauuau

SEQ ID NO: 21862 - RNA, 20 nt, Artificial Sequence
  HTT spacer sequence GTCN PAM
ccaagccuaaaaucauaaug

SEQ ID NO: 21863 - RNA, 20 nt, Artificial Sequence
  HTT spacer sequence GTCN PAM
gauggguauggcuguucugc

SEQ ID NO: 21864 - RNA, 20 nt, Artificial Sequence
  HTT spacer sequence GTCN PAM
uagaaaacagcucccaucac

SEQ ID NO: 21865 - RNA, 20 nt, Artificial Sequence
  HTT spacer sequence GTCN PAM
ucauuuaggcuuuugggauu

SEQ ID NO: 21866 - RNA, 20 nt, Artificial Sequence
  HTT spacer sequence GTCN PAM
uuuaggcuuuugggauuugu

SEQ ID NO: 21867 - RNA, 20 nt, Artificial Sequence
  HTT spacer sequence GTCN PAM
ggcguucucuaggacacugu

SEQ ID NO: 21868 - RNA, 20 nt, Artificial Sequence
  HTT spacer sequence GTCN PAM
uagagaacgccagacuacuc

SEQ ID NO: 21869 - RNA, 20 nt, Artificial Sequence
  HTT spacer sequence GTCN PAM
uaccuccccacaguguccua

SEQ ID NO: 21870 - RNA, 20 nt, Artificial Sequence
  HTT spacer sequence GTCN PAM
gccccugugccccaaacauu

SEQ ID NO: 21871 - RNA, 20 nt, Artificial Sequence
  HTT spacer sequence GTCN PAM
gcaguuuugaucacugguuc

SEQ ID NO: 21872 - RNA, 20 nt, Artificial Sequence
  HTT spacer sequence GTCN PAM
ugcugguauugucauucauu

SEQ ID NO: 21873 - RNA, 20 nt, Artificial Sequence
  HTT spacer sequence GTCN PAM
uucauucuuucaaucacuaa

SEQ ID NO: 21874 - RNA, 20 nt, Artificial Sequence
  HTT spacer sequence GTCN PAM
gcaggaagucuuaagaaugg

SEQ ID NO: 21875 - RNA, 20 nt, Artificial Sequence
  HTT spacer sequence GTCN PAM
uaagaauggagccugggguc

SEQ ID NO: 21876 - RNA, 20 nt, Artificial Sequence
  HTT spacer sequence GTCN PAM
aaaugagagcccucaguggc

SEQ ID NO: 21877 - RNA, 20 nt, Artificial Sequence
  HTT spacer sequence GTCN PAM
uuuugaauaccggugguggg

SEQ ID NO: 21878 - RNA, 20 nt, Artificial Sequence
  HTT spacer sequence GTCN PAM
ccccaucccaccaccgguau

SEQ ID NO: 21879 - RNA, 20 nt, Artificial Sequence
  HTT spacer sequence GTCN PAM
agccggccuuggagaagcuu

SEQ ID NO: 21880 - RNA, 20 nt, Artificial Sequence
  HTT spacer sequence GTCN PAM
ccaucuccacccagaagcuu

SEQ ID NO: 21881 - RNA, 20 nt, Artificial Sequence
  HTT spacer sequence GTCN PAM
gcuggguccacucucuuccc

SEQ ID NO: 21882 - RNA, 20 nt, Artificial Sequence
  HTT spacer sequence GTCN PAM
acucucuucccaccuggcau

SEQ ID NO: 21883 - RNA, 20 nt, Artificial Sequence
  HTT spacer sequence GTCN PAM
ugcagcaaggacacccuaca

SEQ ID NO: 21884 - RNA, 20 nt, Artificial Sequence
  HTT spacer sequence GTCN PAM
uugcugcaagacaugccagg

SEQ ID NO: 21885 - RNA, 20 nt, Artificial Sequence
  HTT spacer sequence GTCN PAM
cuccugccguguaggguguc

SEQ ID NO: 21886 - RNA, 20 nt, Artificial Sequence
  HTT spacer sequence GTCN PAM
uucacacagggcugccucug

SEQ ID NO: 21887 - RNA, 20 nt, Artificial Sequence
  HTT spacer sequence GTCN PAM
uaggauuggguugauacggg

SEQ ID NO: 21888 - RNA, 20 nt, Artificial Sequence
  HTT spacer sequence GTCN PAM
cccccgacacacacacacuu

SEQ ID NO: 21889 - RNA, 20 nt, Artificial Sequence
  HTT spacer sequence GTCN PAM
ggggagacacaggauuuuua

SEQ ID NO: 21890 - RNA, 20 nt, Artificial Sequence
  HTT spacer sequence GTCN PAM
ugggacuuuaaccccauuuc

SEQ ID NO: 21891 - RNA, 20 nt, Artificial Sequence
  HTT spacer sequence GTCN PAM
caagaccagcaagugugugu

SEQ ID NO: 21892 - RNA, 20 nt, Artificial Sequence
  HTT spacer sequence GTCN PAM
cacacaacuggaaauggggu

SEQ ID NO: 21893 - RNA, 20 nt, Artificial Sequence
  HTT spacer sequence GTCN PAM
caaaaaaaaaaaaaaaaaaa

SEQ ID NO: 21894 - RNA, 20 nt, Artificial Sequence
  HTT spacer sequence GTCN PAM
ugcucuauugcccaggcugg

SEQ ID NO: 21895 - RNA, 20 nt, Artificial Sequence
  HTT spacer sequence GTCN PAM
gccuccugaguagcugggau

SEQ ID NO: 21896 - RNA, 20 nt, Artificial Sequence
  HTT spacer sequence GTCN PAM
aaaaaaaaaaagaaagaaaa

SEQ ID NO: 21897 - RNA, 20 nt, Artificial Sequence
  HTT spacer sequence GTCN PAM
ugcccucucacccaggcuag

SEQ ID NO: 21898 - RNA, 20 nt, Artificial Sequence
  HTT spacer sequence GTCN PAM
aggcuguagugagcugugau

SEQ ID NO: 21899 - RNA, 20 nt, Artificial Sequence
  HTT spacer sequence GTCN PAM
cagcuacuagggaggcugag

SEQ ID NO: 21900 - RNA, 20 nt, Artificial Sequence
  HTT spacer sequence GTCN PAM
ugcuauguuacugaggcugg

SEQ ID NO: 21901 - RNA, 20 nt, Artificial Sequence
  HTT spacer sequence GTCN PAM
caaaccucugagcucaaaug

SEQ ID NO: 21902 - RNA, 20 nt, Artificial Sequence
  HTT spacer sequence GTCN PAM
uacaauguggggcaagggga

SEQ ID NO: 21903 - RNA, 20 nt, Artificial Sequence
  HTT spacer sequence GTCN PAM
gggccuuggaugugcagcug

SEQ ID NO: 21904 - RNA, 20 nt, Artificial Sequence
  HTT spacer sequence GTCN PAM
aaauuccagauucaagauaa

SEQ ID NO: 21905 - RNA, 20 nt, Artificial Sequence
  HTT spacer sequence GTCN PAM
gcuguccaaauuccagauuc

SEQ ID NO: 21906 - RNA, 20 nt, Artificial Sequence
  HTT spacer sequence GTCN PAM
gcagaugcaaaccaucuuug

SEQ ID NO: 21907 - RNA, 20 nt, Artificial Sequence
  HTT spacer sequence GTCN PAM
gaaacuacuauucuagaggc

SEQ ID NO: 21908 - RNA, 20 nt, Artificial Sequence
  HTT spacer sequence GTCN PAM
gaaaauugaggcugacaguu

SEQ ID NO: 21909 - RNA, 20 nt, Artificial Sequence
  HTT spacer sequence GTCN PAM
gccucaauuuucagacuguu

SEQ ID NO: 21910 - RNA, 20 nt, Artificial Sequence
  HTT spacer sequence GTCN PAM
ugauccugggcggccccacc

SEQ ID NO: 21911 - RNA, 20 nt, Artificial Sequence
  HTT spacer sequence GTCN PAM
acccccccagccccgugguc

SEQ ID NO: 21912 - RNA, 20 nt, Artificial Sequence
  HTT spacer sequence GTCN PAM
cugggcacuggggugucacu

SEQ ID NO: 21913 - RNA, 20 nt, Artificial Sequence
  HTT spacer sequence GTCN PAM
cugggagggacacgcaggag

SEQ ID NO: 21914 - RNA, 20 nt, Artificial Sequence
  HTT spacer sequence GTCN PAM
cucccagugacaccccagug

SEQ ID NO: 21915 - RNA, 20 nt, Artificial Sequence
  HTT spacer sequence GTCN PAM
cuccugcgugucccucccag

SEQ ID NO: 21916 - RNA, 20 nt, Artificial Sequence
  HTT spacer sequence GTCN PAM
gucccuccugcgugucccuc

SEQ ID NO: 21917 - RNA, 20 nt, Artificial Sequence
  HTT spacer sequence GTCN PAM
acaguaggugcuuaguucuc

SEQ ID NO: 21918 - RNA, 20 nt, Artificial Sequence
  HTT spacer sequence GTCN PAM
aggcccgcgacaacgccagu

SEQ ID NO: 21919 - RNA, 20 nt, Artificial Sequence
  HTT spacer sequence GTCN PAM
cgggccuagacgccgggucc

SEQ ID NO: 21920 - RNA, 20 nt, Artificial Sequence
  HTT spacer sequence GTCN PAM
ucgccccccaggggccucgu

SEQ ID NO: 21921 - RNA, 20 nt, Artificial Sequence
  HTT spacer sequence GTCN PAM
cggggccgcggaggccacgu

SEQ ID NO: 21922 - RNA, 20 nt, Artificial Sequence
  HTT spacer sequence GTCN PAM
gagcugggcguggggcgggg

SEQ ID NO: 21923 - RNA, 20 nt, Artificial Sequence
  HTT spacer sequence GTCN PAM
cgcaauccuggagguccgag

SEQ ID NO: 21924 - RNA, 20 nt, Artificial Sequence
  HTT spacer sequence GTCN PAM
gcccuccuccuggccccgcc

SEQ ID NO: 21925 - RNA, 20 nt, Artificial Sequence
  HTT spacer sequence GTCN PAM
cgcccgcgcccgcccagucc

SEQ ID NO: 21926 - RNA, 20 nt, Artificial Sequence
  HTT spacer sequence GTCN PAM
cgcgggcgggagcgccuggc

SEQ ID NO: 21927 - RNA, 20 nt, Artificial Sequence
  HTT spacer sequence GTCN PAM
agccgccgccucgacccagg

SEQ ID NO: 21928 - RNA, 20 nt, Artificial Sequence
  HTT spacer sequence GTCN PAM
aggcggcggcuugacucggc

SEQ ID NO: 21929 - RNA, 20 nt, Artificial Sequence
  HTT spacer sequence GTCN PAM
cggcgggucucgggggucuc

SEQ ID NO: 21930 - RNA, 20 nt, Artificial Sequence
  HTT spacer sequence GTCN PAM
cgggggucucgcgggggggc

SEQ ID NO: 21931 - RNA, 20 nt, Artificial Sequence
  HTT spacer sequence GTCN PAM
cgcgggggggcggucuccgc

SEQ ID NO: 21932 - RNA, 20 nt, Artificial Sequence
  HTT spacer sequence GTCN PAM
ccgcgucuggaaggggcucg

SEQ ID NO: 21933 - RNA, 20 nt, Artificial Sequence
  HTT spacer sequence GTCN PAM
ggaaggggcucggcgggccu

SEQ ID NO: 21934 - RNA, 20 nt, Artificial Sequence
  HTT spacer sequence GTCN PAM
gggggcucucggcgggucuc

SEQ ID NO: 21935 - RNA, 20 nt, Artificial Sequence
  HTT spacer sequence GTCN PAM
cgggggucucgggggagucu

SEQ ID NO: 21936 - RNA, 20 nt, Artificial Sequence
  HTT spacer sequence GTCN PAM
cgggggagucucgggguccc

SEQ ID NO: 21937 - RNA, 20 nt, Artificial Sequence
  HTT spacer sequence GTCN PAM
cggggucccgacaggucucg

SEQ ID NO: 21938 - RNA, 20 nt, Artificial Sequence
  HTT spacer sequence GTCN PAM
cgacaggucucggcgggucu

SEQ ID NO: 21939 - RNA, 20 nt, Artificial Sequence
  HTT spacer sequence GTCN PAM
ggaccccgagacucccccga

SEQ ID NO: 21940 - RNA, 20 nt, Artificial Sequence
  HTT spacer sequence GTCN PAM
cggcgggucucgggggucuc

SEQ ID NO: 21941 - RNA, 20 nt, Artificial Sequence
  HTT spacer sequence GTCN PAM
cgggggucucgggggagucu

SEQ ID NO: 21942 - RNA, 20 nt, Artificial Sequence
  HTT spacer sequence GTCN PAM
cgggggagucuccggggagu

SEQ ID NO: 21943 - RNA, 20 nt, Artificial Sequence
  HTT spacer sequence GTCN PAM
ccggggagucucaggggucc

SEQ ID NO: 21944 - RNA, 20 nt, Artificial Sequence
  HTT spacer sequence GTCN PAM
caggggucccggcaggucuu

SEQ ID NO: 21945 - RNA, 20 nt, Artificial Sequence
  HTT spacer sequence GTCN PAM
cggcaggucuuggcaggucu

SEQ ID NO: 21946 - RNA, 20 nt, Artificial Sequence
  HTT spacer sequence GTCN PAM
uggcaggucucgggggaguc

SEQ ID NO: 21947 - RNA, 20 nt, Artificial Sequence
  HTT spacer sequence GTCN PAM
cgggggagucucaggguccc

SEQ ID NO: 21948 - RNA, 20 nt, Artificial Sequence
  HTT spacer sequence GTCN PAM
cagggucccggcagguaugg

SEQ ID NO: 21949 - RNA, 20 nt, Artificial Sequence
  HTT spacer sequence GTCN PAM
cggcagguaugggcgggugu

SEQ ID NO: 21950 - RNA, 20 nt, Artificial Sequence
  HTT spacer sequence GTCN PAM
ggggucucgggugcgcagca

SEQ ID NO: 21951 - RNA, 20 nt, Artificial Sequence
  HTT spacer sequence GTCN PAM
cgggugcgcagcagccuccc

SEQ ID NO: 21952 - RNA, 20 nt, Artificial Sequence
  HTT spacer sequence GTCN PAM
uugccaaaggacgcacgggg

SEQ ID NO: 21953 - RNA, 20 nt, Artificial Sequence
  HTT spacer sequence GTCN PAM
uuuggcaaggacacggaggc

SEQ ID NO: 21954 - RNA, 20 nt, Artificial Sequence
  HTT spacer sequence GTCN PAM
cuugccgggggcucaggggu

SEQ ID NO: 21955 - RNA, 20 nt, Artificial Sequence
  HTT spacer sequence GTCN PAM
caccgccucccaccccugag

SEQ ID NO: 21956 - RNA, 20 nt, Artificial Sequence
  HTT spacer sequence GTCN PAM
guuucgcaccccucgcgccc

SEQ ID NO: 21957 - RNA, 20 nt, Artificial Sequence
  HTT spacer sequence GTCN PAM
cguaaaggggccccgccgcg

SEQ ID NO: 21958 - RNA, 20 nt, Artificial Sequence
  HTT spacer sequence GTCN PAM
uguggggagggucgcguaaa

SEQ ID NO: 21959 - RNA, 20 nt, Artificial Sequence
  HTT spacer sequence GTCN PAM
cucacacuucagugugaauc

SEQ ID NO: 21960 - RNA, 20 nt, Artificial Sequence
  HTT spacer sequence GTCN PAM
gagacucucaugggcaacag

SEQ ID NO: 21961 - RNA, 20 nt, Artificial Sequence
  HTT spacer sequence GTCN PAM
cagacgcccggcuaucaguc

SEQ ID NO: 21962 - RNA, 20 nt, Artificial Sequence
  HTT spacer sequence GTCN PAM
cucugccaccccugagauuc

SEQ ID NO: 21963 - RNA, 20 nt, Artificial Sequence
  HTT spacer sequence GTCN PAM
ccgcccccuaacuccuccag

SEQ ID NO: 21964 - RNA, 20 nt, Artificial Sequence
  HTT spacer sequence GTCN PAM
acagaugagcaaacugaggc

SEQ ID NO: 21965 - RNA, 20 nt, Artificial Sequence
  HTT spacer sequence GTCN PAM
ccagugucaacagaugagca

SEQ ID NO: 21966 - RNA, 20 nt, Artificial Sequence
  HTT spacer sequence GTCN PAM
aguggccacacuuaaguccu

SEQ ID NO: 21967 - RNA, 20 nt, Artificial Sequence
  HTT spacer sequence GTCN PAM
uucgaauuggcuguggccag

SEQ ID NO: 21968 - RNA, 20 nt, Artificial Sequence
  HTT spacer sequence GTCN PAM
accccagcagcccacacgga

SEQ ID NO: 21969 - RNA, 20 nt, Artificial Sequence
  HTT spacer sequence GTCN PAM
uccaggcaggcuguccaccc

SEQ ID NO: 21970 - RNA, 20 nt, Artificial Sequence
  HTT spacer sequence GTCN PAM
ccugcaaggccacacacaug

SEQ ID NO: 21971 - RNA, 20 nt, Artificial Sequence
  HTT spacer sequence GTCN PAM
gcccugcaccaacuccauga

SEQ ID NO: 21972 - RNA, 20 nt, Artificial Sequence
  HTT spacer sequence GTCN PAM
aggcucauggaguuggugca

SEQ ID NO: 21973 - RNA, 20 nt, Artificial Sequence
  HTT spacer sequence GTCN PAM
cacagggccugagccaguga

SEQ ID NO: 21974 - RNA, 20 nt, Artificial Sequence
  HTT spacer sequence GTCN PAM
acugucuccucuacguagac

SEQ ID NO: 21975 - RNA, 20 nt, Artificial Sequence
  HTT spacer sequence GTCN PAM
ccucuacguagacaccgucg

SEQ ID NO: 21976 - RNA, 20 nt, Artificial Sequence
  HTT spacer sequence GTCN PAM
acguagaggagacaguggac

SEQ ID NO: 21977 - RNA, 20 nt, Artificial Sequence
  HTT spacer sequence GTCN PAM
aagggcccucuuggagccca

SEQ ID NO: 21978 - RNA, 20 nt, Artificial Sequence
  HTT spacer sequence GTCN PAM
ugccaggaguggagugccug

SEQ ID NO: 21979 - RNA, 20 nt, Artificial Sequence
  HTT spacer sequence GTCN PAM
caggccuccuguccugccag

SEQ ID NO: 21980 - RNA, 20 nt, Artificial Sequence
  HTT spacer sequence GTCN PAM
auccccucucccugccaccc

SEQ ID NO: 21981 - RNA, 20 nt, Artificial Sequence
  HTT spacer sequence GTCN PAM
uccuucugccugcccccucc

SEQ ID NO: 21982 - RNA, 20 nt, Artificial Sequence
  HTT spacer sequence GTCN PAM
aggaacugccagccagggcc

SEQ ID NO: 21983 - RNA, 20 nt, Artificial Sequence
  HTT spacer sequence GTCN PAM
gcaccccucucaccagaugg

SEQ ID NO: 21984 - RNA, 20 nt, Artificial Sequence
  HTT spacer sequence GTCN PAM
ccugucagcaccccucucac

SEQ ID NO: 21985 - RNA, 20 nt, Artificial Sequence
  HTT spacer sequence GTCN PAM
ccaggccuccaggaucaugg

SEQ ID NO: 21986 - RNA, 20 nt, Artificial Sequence
  HTT spacer sequence GTCN PAM
gccucuucaggccagccucc

SEQ ID NO: 21987 - RNA, 20 nt, Artificial Sequence
  HTT spacer sequence GTCN PAM
ucccucugucugccucuuca

SEQ ID NO: 21988 - RNA, 20 nt, Artificial Sequence
  HTT spacer sequence GTCN PAM
augugggcagaaagggccaa

SEQ ID NO: 21989 - RNA, 20 nt, Artificial Sequence
  HTT spacer sequence GTCN PAM
gcuggagcuccccacccccc

SEQ ID NO: 21990 - RNA, 20 nt, Artificial Sequence
  HTT spacer sequence GTCN PAM
gugggccugcuugugugcgu

SEQ ID NO: 21991 - RNA, 20 nt, Artificial Sequence
  HTT spacer sequence GTCN PAM
aggggcccagagagacgaga

SEQ ID NO: 21992 - RNA, 20 nt, Artificial Sequence
  HTT spacer sequence GTCN PAM
cucugggccccuggacuucc

SEQ ID NO: 21993 - RNA, 20 nt, Artificial Sequence
  HTT spacer sequence GTCN PAM
uggaugagaaaacggagggg

SEQ ID NO: 21994 - RNA, 20 nt, Artificial Sequence
  HTT spacer sequence GTCN PAM
guaggggggauggugguggu

SEQ ID NO: 21995 - RNA, 20 nt, Artificial Sequence
  HTT spacer sequence GTCN PAM
ccaccaccaccauccccccu

SEQ ID NO: 21996 - RNA, 20 nt, Artificial Sequence
  HTT spacer sequence GTCN PAM
cugaauaccaagcacauguc

SEQ ID NO: 21997 - RNA, 20 nt, Artificial Sequence
  HTT spacer sequence GTCN PAM
cugagggugcucucccuggu

SEQ ID NO: 21998 - RNA, 20 nt, Artificial Sequence
  HTT spacer sequence GTCN PAM
ucagggccgcuguauguccu

SEQ ID NO: 21999 - RNA, 20 nt, Artificial Sequence
  HTT spacer sequence GTCN PAM
uguuuugggugggggcaggg

SEQ ID NO: 22000 - RNA, 20 nt, Artificial Sequence
  HTT spacer sequence GTCN PAM
cugcccccacccaaaacagg

SEQ ID NO: 22001 - RNA, 20 nt, Artificial Sequence
  HTT spacer sequence GTCN PAM
aaugugggcaggaaccuggg

SEQ ID NO: 22002 - RNA, 20 nt, Artificial Sequence
  HTT spacer sequence GTCN PAM
aucaggaguggccaguguug

SEQ ID NO: 22003 - RNA, 20 nt, Artificial Sequence
  HTT spacer sequence GTCN PAM
uccugcguucuguccucaaa

SEQ ID NO: 22004 - RNA, 20 nt, Artificial Sequence
  HTT spacer sequence GTCN PAM
ucaaaagcucccuugugggg

SEQ ID NO: 22005 - RNA, 20 nt, Artificial Sequence
  HTT spacer sequence GTCN PAM
ccacaagggagcuuuugagg

SEQ ID NO: 22006 - RNA, 20 nt, Artificial Sequence
  HTT spacer sequence GTCN PAM
gugacuauguguggcaggcu

SEQ ID NO: 22007 - RNA, 20 nt, Artificial Sequence
  HTT spacer sequence GTCN PAM
cugaccugggguguccccac

SEQ ID NO: 22008 - RNA, 20 nt, Artificial Sequence
  HTT spacer sequence GTCN PAM
ucucuugaccucaugaucug

SEQ ID NO: 22009 - RNA, 20 nt, Artificial Sequence
  HTT spacer sequence GTCN PAM
agagaggacagagagugagg

SEQ ID NO: 22010 - RNA, 20 nt, Artificial Sequence
  HTT spacer sequence GTCN PAM
uuuccccgccagccugcccu

SEQ ID NO: 22011 - RNA, 20 nt, Artificial Sequence
  HTT spacer sequence GTCN PAM
uaccccagacgcaguggagc

SEQ ID NO: 22012 - RNA, 20 nt, Artificial Sequence
  HTT spacer sequence GTCN PAM
gggguaggacagcucucacc

SEQ ID NO: 22013 - RNA, 20 nt, Artificial Sequence
  HTT spacer sequence GTCN PAM
ggaggagggaucugagccgg

SEQ ID NO: 22014 - RNA, 20 nt, Artificial Sequence
  HTT spacer sequence GTCN PAM
guaccugcauggcugcccgc

SEQ ID NO: 22015 - RNA, 20 nt, Artificial Sequence
  HTT spacer sequence GTCN PAM
gucuguaccugcauggcugc

SEQ ID NO: 22016 - RNA, 20 nt, Artificial Sequence
  HTT spacer sequence GTCN PAM
cccacccucccuaccgcccg

SEQ ID NO: 22017 - RNA, 20 nt, Artificial Sequence
  HTT spacer sequence GTCN PAM
aacuggucucccacccuccc

SEQ ID NO: 22018 - RNA, 20 nt, Artificial Sequence
  HTT spacer sequence GTCN PAM
gcacggccccuucuccuugc

SEQ ID NO: 22019 - RNA, 20 nt, Artificial Sequence
  HTT spacer sequence GTCN PAM
ggacaccgaggggcuggaga

SEQ ID NO: 22020 - RNA, 20 nt, Artificial Sequence
  HTT spacer sequence GTCN PAM
agacagggccaccagaagaa

SEQ ID NO: 22021 - RNA, 20 nt, Artificial Sequence
  HTT spacer sequence GTCN PAM
ccagccccucgguguccaga

SEQ ID NO: 22022 - RNA, 20 nt, Artificial Sequence
  HTT spacer sequence GTCN PAM
cacgugugggcugccuaagu

SEQ ID NO: 22023 - RNA, 20 nt, Artificial Sequence
  HTT spacer sequence GTCN PAM
cagagggggugguagggagc

SEQ ID NO: 22024 - RNA, 20 nt, Artificial Sequence
  HTT spacer sequence GTCN PAM
agugccccagggaagggggc

SEQ ID NO: 22025 - RNA, 20 nt, Artificial Sequence
  HTT spacer sequence GTCN PAM
acccucccgugcacaggcca

SEQ ID NO: 22026 - RNA, 20 nt, Artificial Sequence
  HTT spacer sequence GTCN PAM
cuugcucuuggcaccauccu

SEQ ID NO: 22027 - RNA, 20 nt, Artificial Sequence
  HTT spacer sequence GTCN PAM
ccuggcccguggcugagggc

SEQ ID NO: 22028 - RNA, 20 nt, Artificial Sequence
  HTT spacer sequence GTCN PAM
ggaagugcaauucgccuaca

SEQ ID NO: 22029 - RNA, 20 nt, Artificial Sequence
  HTT spacer sequence GTCN PAM
ucccguuuugcagaucagga

SEQ ID NO: 22030 - RNA, 20 nt, Artificial Sequence
  HTT spacer sequence GTCN PAM
cuggcucuggaccacgcugc

SEQ ID NO: 22031 - RNA, 20 nt, Artificial Sequence
  HTT spacer sequence GTCN PAM
agagccagggacuucuguca

SEQ ID NO: 22032 - RNA, 20 nt, Artificial Sequence
  HTT spacer sequence GTCN PAM
ggggcccggcacggaaccca

SEQ ID NO: 22033 - RNA, 20 nt, Artificial Sequence
  HTT spacer sequence GTCN PAM
cccuugaaggaugaguguag

SEQ ID NO: 22034 - RNA, 20 nt, Artificial Sequence
  HTT spacer sequence GTCN PAM
ccacccgccccgaaccuggg

SEQ ID NO: 22035 - RNA, 20 nt, Artificial Sequence
  HTT spacer sequence GTCN PAM
gacaggaguucgagguggug

SEQ ID NO: 22036 - RNA, 20 nt, Artificial Sequence
  HTT spacer sequence GTCN PAM
gacccaggucuccacccgcc

SEQ ID NO: 22037 - RNA, 20 nt, Artificial Sequence
  HTT spacer sequence GTCN PAM
ggcccugcuugguuucccgg

SEQ ID NO: 22038 - RNA, 20 nt, Artificial Sequence
  HTT spacer sequence GTCN PAM
ccucagggcguuggggccag

SEQ ID NO: 22039 - RNA, 20 nt, Artificial Sequence
  HTT spacer sequence GTCN PAM
caucugguccaucuuuguca

SEQ ID NO: 22040 - RNA, 20 nt, Artificial Sequence
  HTT spacer sequence GTCN PAM
aucuuugucagcuggccucu

SEQ ID NO: 22041 - RNA, 20 nt, Artificial Sequence
  HTT spacer sequence GTCN PAM
gcuggccucugggaagaaug

SEQ ID NO: 22042 - RNA, 20 nt, Artificial Sequence
  HTT spacer sequence GTCN PAM
gcucaagccugcagagggag

SEQ ID NO: 22043 - RNA, 20 nt, Artificial Sequence
  HTT spacer sequence GTCN PAM
gccaggcuggcaggcaacag

SEQ ID NO: 22044 - RNA, 20 nt, Artificial Sequence
  HTT spacer sequence GTCN PAM
gagggcuucagcguccuccu

SEQ ID NO: 22045 - RNA, 20 nt, Artificial Sequence
  HTT spacer sequence GTCN PAM
uccuugugaaauggggugaa

SEQ ID NO: 22046 - RNA, 20 nt, Artificial Sequence
  HTT spacer sequence GTCN PAM
aacucaugggaggccagauc

SEQ ID NO: 22047 - RNA, 20 nt, Artificial Sequence
  HTT spacer sequence GTCN PAM
agggcagggaggcccuagcu

SEQ ID NO: 22048 - RNA, 20 nt, Artificial Sequence
  HTT spacer sequence GTCN PAM
uggguccccaugcccugcag

SEQ ID NO: 22049 - RNA, 20 nt, Artificial Sequence
  HTT spacer sequence GTCN PAM
ccaugcccugcagcccuguc

SEQ ID NO: 22050 - RNA, 20 nt, Artificial Sequence
  HTT spacer sequence GTCN PAM
acuguccugagcuaggcaua

SEQ ID NO: 22051 - RNA, 20 nt, Artificial Sequence
  HTT spacer sequence GTCN PAM
ugagcuaggcauaggggugg

SEQ ID NO: 22052 - RNA, 20 nt, Artificial Sequence
  HTT spacer sequence GTCN PAM
aggggcagccagcagcaagg

SEQ ID NO: 22053 - RNA, 20 nt, Artificial Sequence
  HTT spacer sequence GTCN PAM
uucugggagccuggaaugcu

SEQ ID NO: 22054 - RNA, 20 nt, Artificial Sequence
  HTT spacer sequence GTCN PAM
uuggcuuuuucucagccuug

SEQ ID NO: 22055 - RNA, 20 nt, Artificial Sequence
  HTT spacer sequence GTCN PAM
ggggcaguggugcgccuuua

SEQ ID NO: 22056 - RNA, 20 nt, Artificial Sequence
  HTT spacer sequence GTCN PAM
accacugccccagaggcaga

SEQ ID NO: 22057 - RNA, 20 nt, Artificial Sequence
  HTT spacer sequence GTCN PAM
gcucuugcagugcaugccua

SEQ ID NO: 22058 - RNA, 20 nt, Artificial Sequence
  HTT spacer sequence GTCN PAM
gagggcaggaccgcuggcag

SEQ ID NO: 22059 - RNA, 20 nt, Artificial Sequence
  HTT spacer sequence GTCN PAM
ugcccucugaccuguggccu

SEQ ID NO: 22060 - RNA, 20 nt, Artificial Sequence
  HTT spacer sequence GTCN PAM
ucagcugaaauugcuucuaa

SEQ ID NO: 22061 - RNA, 20 nt, Artificial Sequence
  HTT spacer sequence GTCN PAM
guccugcuuggugcucaggg

SEQ ID NO: 22062 - RNA, 20 nt, Artificial Sequence
  HTT spacer sequence GTCN PAM
ugcuuggugcucaggguacc

SEQ ID NO: 22063 - RNA, 20 nt, Artificial Sequence
  HTT spacer sequence GTCN PAM
auggccaccaugcauguuga

SEQ ID NO: 22064 - RNA, 20 nt, Artificial Sequence
  HTT spacer sequence GTCN PAM
acaugcaugguggccauaga

SEQ ID NO: 22065 - RNA, 20 nt, Artificial Sequence
  HTT spacer sequence GTCN PAM
ccauggaugggucaacaugc

SEQ ID NO: 22066 - RNA, 20 nt, Artificial Sequence
  HTT spacer sequence GTCN PAM
gccugccccuccugcuuggg

SEQ ID NO: 22067 - RNA, 20 nt, Artificial Sequence
  HTT spacer sequence GTCN PAM
gggucgcgucugagagccca

SEQ ID NO: 22068 - RNA, 20 nt, Artificial Sequence
  HTT spacer sequence GTCN PAM
cgucugagagcccaugcccu

SEQ ID NO: 22069 - RNA, 20 nt, Artificial Sequence
  HTT spacer sequence GTCN PAM
gagagcccaugcccuggugg

SEQ ID NO: 22070 - RNA, 20 nt, Artificial Sequence
  HTT spacer sequence GTCN PAM
cagaggaagggugaggggag

SEQ ID NO: 22071 - RNA, 20 nt, Artificial Sequence
  HTT spacer sequence GTCN PAM
cuccccccaccuguguuuaa

SEQ ID NO: 22072 - RNA, 20 nt, Artificial Sequence
  HTT spacer sequence GTCN PAM
gccuggcagcugccgcccag

SEQ ID NO: 22073 - RNA, 20 nt, Artificial Sequence
  HTT spacer sequence GTCN PAM
gauauuaucugauuggaaac

SEQ ID NO: 22074 - RNA, 20 nt, Artificial Sequence
  HTT spacer sequence GTCN PAM
cccacgaaacucuucagguu

SEQ ID NO: 22075 - RNA, 20 nt, Artificial Sequence
  HTT spacer sequence GTCN PAM
cagcgcagcccgcaggggga

SEQ ID NO: 22076 - RNA, 20 nt, Artificial Sequence
  HTT spacer sequence GTCN PAM
cugcugccggguggcaggca

SEQ ID NO: 22077 - RNA, 20 nt, Artificial Sequence
  HTT spacer sequence GTCN PAM
cgguggcccuggcagcggua

SEQ ID NO: 22078 - RNA, 20 nt, Artificial Sequence
  HTT spacer sequence GTCN PAM
ucccuaucuaccgcugccag

SEQ ID NO: 22079 - RNA, 20 nt, Artificial Sequence
  HTT spacer sequence GTCN PAM
guguccccuguccucucccu

SEQ ID NO: 22080 - RNA, 20 nt, Artificial Sequence
  HTT spacer sequence GTCN PAM
ccuguccucucccugaacga

SEQ ID NO: 22081 - RNA, 20 nt, Artificial Sequence
  HTT spacer sequence GTCN PAM
ucucccugaacgaaagugcu

SEQ ID NO: 22082 - RNA, 20 nt, Artificial Sequence
  HTT spacer sequence GTCN PAM
caaagagcuggcaccugagg

SEQ ID NO: 22083 - RNA, 20 nt, Artificial Sequence
  HTT spacer sequence GTCN PAM
aagcaaaaggccggauuucu

SEQ ID NO: 22084 - RNA, 20 nt, Artificial Sequence
  HTT spacer sequence GTCN PAM
ccaugcagggcuguguaccc

SEQ ID NO: 22085 - RNA, 20 nt, Artificial Sequence
  HTT spacer sequence GTCN PAM
gggaggggcguuuccgagag

SEQ ID NO: 22086 - RNA, 20 nt, Artificial Sequence
  HTT spacer sequence GTCN PAM
gcugauggcugggcagauag

SEQ ID NO: 22087 - RNA, 20 nt, Artificial Sequence
  HTT spacer sequence GTCN PAM
gcagagugaguuugaccagg

SEQ ID NO: 22088 - RNA, 20 nt, Artificial Sequence
  HTT spacer sequence GTCN PAM
aacucacucugcugaccacu

SEQ ID NO: 22089 - RNA, 20 nt, Artificial Sequence
  HTT spacer sequence GTCN PAM
ucuuccccucugcccugguc

SEQ ID NO: 22090 - RNA, 20 nt, Artificial Sequence
  HTT spacer sequence GTCN PAM
cuucccccagcucgggggau

SEQ ID NO: 22091 - RNA, 20 nt, Artificial Sequence
  HTT spacer sequence GTCN PAM
cagccugggaacgccugagg

SEQ ID NO: 22092 - RNA, 20 nt, Artificial Sequence
  HTT spacer sequence GTCN PAM
cacggccuggccugguggag

SEQ ID NO: 22093 - RNA, 20 nt, Artificial Sequence
  HTT spacer sequence GTCN PAM
cugcccugcccagagaaggc

SEQ ID NO: 22094 - RNA, 20 nt, Artificial Sequence
  HTT spacer sequence GTCN PAM
ggucaucgaggccuccgggc

SEQ ID NO: 22095 - RNA, 20 nt, Artificial Sequence
  HTT spacer sequence GTCN PAM
ucgaggccuccgggcugauu

SEQ ID NO: 22096 - RNA, 20 nt, Artificial Sequence
  HTT spacer sequence GTCN PAM
uaaucagcccggaggccucg

SEQ ID NO: 22097 - RNA, 20 nt, Artificial Sequence
  HTT spacer sequence GTCN PAM
ugaggcagggcggguacggg

SEQ ID NO: 22098 - RNA, 20 nt, Artificial Sequence
  HTT spacer sequence GTCN PAM
ccacagguggcuccuuccuc

SEQ ID NO: 22099 - RNA, 20 nt, Artificial Sequence
  HTT spacer sequence GTCN PAM
cgccugggagcagcuccucc

SEQ ID NO: 22100 - RNA, 20 nt, Artificial Sequence
  HTT spacer sequence GTCN PAM
cgaggggaaggcauuucaga

SEQ ID NO: 22101 - RNA, 20 nt, Artificial Sequence
  HTT spacer sequence GTCN PAM
cggugagggucccgagggga

SEQ ID NO: 22102 - RNA, 20 nt, Artificial Sequence
  HTT spacer sequence GTCN PAM
agucgcggugagggucccga

SEQ ID NO: 22103 - RNA, 20 nt, Artificial Sequence
  HTT spacer sequence GTCN PAM
gaagcugagcgaaguccagu

SEQ ID NO: 22104 - RNA, 20 nt, Artificial Sequence
  HTT spacer sequence GTCN PAM
ugggugcuggcuucaggaag

SEQ ID NO: 22105 - RNA, 20 nt, Artificial Sequence
  HTT spacer sequence GTCN PAM
cauccucaagaaaaugggaa

SEQ ID NO: 22106 - RNA, 20 nt, Artificial Sequence
  HTT spacer sequence GTCN PAM
ggguggcugugccugccucu

SEQ ID NO: 22107 - RNA, 20 nt, Artificial Sequence
  HTT spacer sequence GTCN PAM
uuucucaaucuucuuccuuc

SEQ ID NO: 22108 - RNA, 20 nt, Artificial Sequence
  HTT spacer sequence GTCN PAM
ccuugaugccagccggcagg

SEQ ID NO: 22109 - RNA, 20 nt, Artificial Sequence
  HTT spacer sequence GTCN PAM
ugagaagcaggggggaccca

SEQ ID NO: 22110 - RNA, 20 nt, Artificial Sequence
  HTT spacer sequence GTCN PAM
ccccugcuucucaggacacc

SEQ ID NO: 22111 - RNA, 20 nt, Artificial Sequence
  HTT spacer sequence GTCN PAM
caaguggguccccccugcuu

SEQ ID NO: 22112 - RNA, 20 nt, Artificial Sequence
  HTT spacer sequence GTCN PAM
ucgagggggccuggguccca

SEQ ID NO: 22113 - RNA, 20 nt, Artificial Sequence
  HTT spacer sequence GTCN PAM
uggcccuuccaguacgaagc

SEQ ID NO: 22114 - RNA, 20 nt, Artificial Sequence
  HTT spacer sequence GTCN PAM
uucacacagccugagcccuc

SEQ ID NO: 22115 - RNA, 20 nt, Artificial Sequence
  HTT spacer sequence GTCN PAM
ggagaccacugccgaacaua

SEQ ID NO: 22116 - RNA, 20 nt, Artificial Sequence
  HTT spacer sequence GTCN PAM
ccagaccccagaguaagcuu

SEQ ID NO: 22117 - RNA, 20 nt, Artificial Sequence
  HTT spacer sequence GTCN PAM
ucuuguggccacugcuugga

SEQ ID NO: 22118 - RNA, 20 nt, Artificial Sequence
  HTT spacer sequence GTCN PAM
ggggaaagggugggggcugc

SEQ ID NO: 22119 - RNA, 20 nt, Artificial Sequence
  HTT spacer sequence GTCN PAM
guggcagcccccacccuuuc

SEQ ID NO: 22120 - RNA, 20 nt, Artificial Sequence
  HTT spacer sequence GTCN PAM
aggcugcagaaggcugggug

SEQ ID NO: 22121 - RNA, 20 nt, Artificial Sequence
  HTT spacer sequence GTCN PAM
ccuccuccacucccacccag

SEQ ID NO: 22122 - RNA, 20 nt, Artificial Sequence
  HTT spacer sequence GTCN PAM
cgucaccuccuccacuccca

SEQ ID NO: 22123 - RNA, 20 nt, Artificial Sequence
  HTT spacer sequence GTCN PAM
gugaccccugcacaggggcu

SEQ ID NO: 22124 - RNA, 20 nt, Artificial Sequence
  HTT spacer sequence GTCN PAM
ccgaccccauccuggucacg

SEQ ID NO: 22125 - RNA, 20 nt, Artificial Sequence
  HTT spacer sequence GTCN PAM
gcugcucccuccccuuucau

SEQ ID NO: 22126 - RNA, 20 nt, Artificial Sequence
  HTT spacer sequence GTCN PAM
caccagggccaaugccaccc

SEQ ID NO: 22127 - RNA, 20 nt, Artificial Sequence
  HTT spacer sequence GTCN PAM
gucccaccagggccaaugcc

SEQ ID NO: 22128 - RNA, 20 nt, Artificial Sequence
  HTT spacer sequence GTCN PAM
ccggcucagucucccuccuc

SEQ ID NO: 22129 - RNA, 20 nt, Artificial Sequence
  HTT spacer sequence GTCN PAM
cccuccuccuuggcuggcuu

SEQ ID NO: 22130 - RNA, 20 nt, Artificial Sequence
  HTT spacer sequence GTCN PAM
gccagaaaagccagccaagg

SEQ ID NO: 22131 - RNA, 20 nt, Artificial Sequence
  HTT spacer sequence GTCN PAM
agagcugccucccuggggag

SEQ ID NO: 22132 - RNA, 20 nt, Artificial Sequence
  HTT spacer sequence GTCN PAM
cuccugaggcugugucccca

SEQ ID NO: 22133 - RNA, 20 nt, Artificial Sequence
  HTT spacer sequence GTCN PAM
ccagaguguccaccgggcug

SEQ ID NO: 22134 - RNA, 20 nt, Artificial Sequence
  HTT spacer sequence GTCN PAM
accgggcugugccaccuccc

SEQ ID NO: 22135 - RNA, 20 nt, Artificial Sequence
  HTT spacer sequence GTCN PAM
gaugcagccugccccugccu

SEQ ID NO: 22136 - RNA, 20 nt, Artificial Sequence
  HTT spacer sequence GTCN PAM
gccccuagggccuccuccug

SEQ ID NO: 22137 - RNA, 20 nt, Artificial Sequence
  HTT spacer sequence GTCN PAM
gcagggccuguaagcaagcc

SEQ ID NO: 22138 - RNA, 20 nt, Artificial Sequence
  HTT spacer sequence GTCN PAM
uacugccacccgagcaguac

SEQ ID NO: 22139 - RNA, 20 nt, Artificial Sequence
  HTT spacer sequence GTCN PAM
ugugaccgccccccccccgg

SEQ ID NO: 22140 - RNA, 20 nt, Artificial Sequence
  HTT spacer sequence GTCN PAM
caggacaagcaccuccacgu

SEQ ID NO: 22141 - RNA, 20 nt, Artificial Sequence
  HTT spacer sequence GTCN PAM
ucagcccggggggggggcgg

SEQ ID NO: 22142 - RNA, 20 nt, Artificial Sequence
  HTT spacer sequence GTCN PAM
cgggcucccgugccaggggu

SEQ ID NO: 22143 - RNA, 20 nt, Artificial Sequence
  HTT spacer sequence GTCN PAM
ggggcuguggugguugggga

SEQ ID NO: 22144 - RNA, 20 nt, Artificial Sequence
  HTT spacer sequence GTCN PAM
ccaaccaccacagccccaga

SEQ ID NO: 22145 - RNA, 20 nt, Artificial Sequence
  HTT spacer sequence GTCN PAM
uuccucagaggggugaaugg

SEQ ID NO: 22146 - RNA, 20 nt, Artificial Sequence
  HTT spacer sequence GTCN PAM
uggggugaccuggccggggg

SEQ ID NO: 22147 - RNA, 20 nt, Artificial Sequence
  HTT spacer sequence GTCN PAM
ccccaagacacccccaaugc

SEQ ID NO: 22148 - RNA, 20 nt, Artificial Sequence
  HTT spacer sequence GTCN PAM
ggcgagguagggcaugggug

SEQ ID NO: 22149 - RNA, 20 nt, Artificial Sequence
  HTT spacer sequence GTCN PAM
uugagagccaccucugcuga

SEQ ID NO: 22150 - RNA, 20 nt, Artificial Sequence
  HTT spacer sequence GTCN PAM
cagccuuucugcugcagccu

SEQ ID NO: 22151 - RNA, 20 nt, Artificial Sequence
  HTT spacer sequence GTCN PAM
agcccccuucccaaggccag

SEQ ID NO: 22152 - RNA, 20 nt, Artificial Sequence
  HTT spacer sequence GTCN PAM
ccuccucuccgcccccaacc

SEQ ID NO: 22153 - RNA, 20 nt, Artificial Sequence
  HTT spacer sequence GTCN PAM
ggaucagggucuccuccucu

SEQ ID NO: 22154 - RNA, 20 nt, Artificial Sequence
  HTT spacer sequence GTCN PAM
ugaccgcggaggaccggggc

SEQ ID NO: 22155 - RNA, 20 nt, Artificial Sequence
  HTT spacer sequence GTCN PAM
agacaggcagggguggaguc

SEQ ID NO: 22156 - RNA, 20 nt, Artificial Sequence
  HTT spacer sequence GTCN PAM
uccgcggucaagacaggcag

SEQ ID NO: 22157 - RNA, 20 nt, Artificial Sequence
  HTT spacer sequence GTCN PAM
gggccccgguccuccgcggu

SEQ ID NO: 22158 - RNA, 20 nt, Artificial Sequence
  HTT spacer sequence GTCN PAM
ggcggugggcccggccugcc

SEQ ID NO: 22159 - RNA, 20 nt, Artificial Sequence
  HTT spacer sequence GTCN PAM
ucacugggccucucugaaca

SEQ ID NO: 22160 - RNA, 20 nt, Artificial Sequence
  HTT spacer sequence GTCN PAM
cccaggcccccucugggcca

SEQ ID NO: 22161 - RNA, 20 nt, Artificial Sequence
  HTT spacer sequence GTCN PAM
ucacccucagcguggcccag

SEQ ID NO: 22162 - RNA, 20 nt, Artificial Sequence
  HTT spacer sequence GTCN PAM
uccuguccccugcccgggcc

SEQ ID NO: 22163 - RNA, 20 nt, Artificial Sequence
  HTT spacer sequence GTCN PAM
ccugcccgggccccgaggcu

SEQ ID NO: 22164 - RNA, 20 nt, Artificial Sequence
  HTT spacer sequence GTCN PAM
ggcccacuccuucuuccuuc

SEQ ID NO: 22165 - RNA, 20 nt, Artificial Sequence
  HTT spacer sequence GTCN PAM
gcaccucuuccuguugccuc

SEQ ID NO: 22166 - RNA, 20 nt, Artificial Sequence
  HTT spacer sequence GTCN PAM
ggccagagaccccggccugg

SEQ ID NO: 22167 - RNA, 20 nt, Artificial Sequence
  HTT spacer sequence GTCN PAM
cuggccggacaggggaaggg

SEQ ID NO: 22168 - RNA, 20 nt, Artificial Sequence
  HTT spacer sequence GTCN PAM
ccuugagcccaccugugcug

SEQ ID NO: 22169 - RNA, 20 nt, Artificial Sequence
  HTT spacer sequence GTCN PAM
uugcgcuggcuuccuccugg

SEQ ID NO: 22170 - RNA, 20 nt, Artificial Sequence
  HTT spacer sequence GTCN PAM
uguccuugcgcuggcuuccu

SEQ ID NO: 22171 - RNA, 20 nt, Artificial Sequence
  HTT spacer sequence GTCN PAM
aggcugggucuuguccuugc

SEQ ID NO: 22172 - RNA, 20 nt, Artificial Sequence
  HTT spacer sequence GTCN PAM
uuuuuuauuccuuaguaaau

SEQ ID NO: 22173 - RNA, 20 nt, Artificial Sequence
  HTT spacer sequence GTCN PAM
ggaguucaagaccagccuga

SEQ ID NO: 22174 - RNA, 20 nt, Artificial Sequence
  HTT spacer sequence GTCN PAM
ugaacuccugaccucaacua

SEQ ID NO: 22175 - RNA, 20 nt, Artificial Sequence
  HTT spacer sequence GTCN PAM
ggcuggucuugaacuccuga

SEQ ID NO: 22176 - RNA, 20 nt, Artificial Sequence
  HTT spacer sequence GTCN PAM
cagccucccgaguagcuggg

SEQ ID NO: 22177 - RNA, 20 nt, Artificial Sequence
  HTT spacer sequence GTCN PAM
cccaggcuggagugcagugg

SEQ ID NO: 22178 - RNA, 20 nt, Artificial Sequence
  HTT spacer sequence GTCN PAM
cucugucacccaggcuggag

SEQ ID NO: 22179 - RNA, 20 nt, Artificial Sequence
  HTT spacer sequence GTCN PAM
ggaguucaagaccagccugg

SEQ ID NO: 22180 - RNA, 20 nt, Artificial Sequence
  HTT spacer sequence GTCN PAM
ugaacuccugaccucaggug

SEQ ID NO: 22181 - RNA, 20 nt, Artificial Sequence
  HTT spacer sequence GTCN PAM
cuacuaaaaauacaaauuag

SEQ ID NO: 22182 - RNA, 20 nt, Artificial Sequence
  HTT spacer sequence GTCN PAM
uaccaccacacccagcuaau

SEQ ID NO: 22183 - RNA, 20 nt, Artificial Sequence
  HTT spacer sequence GTCN PAM
ccuugguucaagcacuucuc

SEQ ID NO: 22184 - RNA, 20 nt, Artificial Sequence
  HTT spacer sequence GTCN PAM
cacuuuggugcccaggcuag

SEQ ID NO: 22185 - RNA, 20 nt, Artificial Sequence
  HTT spacer sequence GTCN PAM
caaaaaaauauaugugugug

SEQ ID NO: 22186 - RNA, 20 nt, Artificial Sequence
  HTT spacer sequence GTCN PAM
uucugcugccuuaaugcauu

SEQ ID NO: 22187 - RNA, 20 nt, Artificial Sequence
  HTT spacer sequence GTCN PAM
acucauuucagcacuugagg

SEQ ID NO: 22188 - RNA, 20 nt, Artificial Sequence
  HTT spacer sequence GTCN PAM
cuucccucuguccacucauu

SEQ ID NO: 22189 - RNA, 20 nt, Artificial Sequence
  HTT spacer sequence GTCN PAM
gcacaacagggucccuuccc

SEQ ID NO: 22190 - RNA, 20 nt, Artificial Sequence
  HTT spacer sequence GTCN PAM
cagccuguggcacccgcuga

SEQ ID NO: 22191 - RNA, 20 nt, Artificial Sequence
  HTT spacer sequence GTCN PAM
gcgggugccacaggcuggga

SEQ ID NO: 22192 - RNA, 20 nt, Artificial Sequence
  HTT spacer sequence GTCN PAM
ccaucugucagcgggugcca

SEQ ID NO: 22193 - RNA, 20 nt, Artificial Sequence
  HTT spacer sequence GTCN PAM
uugggccccucgcuuaccca

SEQ ID NO: 22194 - RNA, 20 nt, Artificial Sequence
  HTT spacer sequence GTCN PAM
uuugcccugacccaggagcu

SEQ ID NO: 22195 - RNA, 20 nt, Artificial Sequence
  HTT spacer sequence GTCN PAM
gggcaaaggacgcuggggcc

SEQ ID NO: 22196 - RNA, 20 nt, Artificial Sequence
  HTT spacer sequence GTCN PAM
agauaaaacgccguaaagug

SEQ ID NO: 22197 - RNA, 20 nt, Artificial Sequence
  HTT spacer sequence GTCN PAM
aagggaggccgccaagaccg

SEQ ID NO: 22198 - RNA, 20 nt, Artificial Sequence
  HTT spacer sequence GTCN PAM
uggcggccucccuuggaccg

SEQ ID NO: 22199 - RNA, 20 nt, Artificial Sequence
  HTT spacer sequence GTCN PAM
cuuucacucaucaccguggu

SEQ ID NO: 22200 - RNA, 20 nt, Artificial Sequence
  HTT spacer sequence GTCN PAM
caaggcccacccuguagggc

SEQ ID NO: 22201 - RNA, 20 nt, Artificial Sequence
  HTT spacer sequence GTCN PAM
ggagccaccacgaugggcac

SEQ ID NO: 22202 - RNA, 20 nt, Artificial Sequence
  HTT spacer sequence GTCN PAM
gagaaacccagccccacugc

SEQ ID NO: 22203 - RNA, 20 nt, Artificial Sequence
  HTT spacer sequence GTCN PAM
acuuccagggccuagggacc

SEQ ID NO: 22204 - RNA, 20 nt, Artificial Sequence
  HTT spacer sequence GTCN PAM
cuaggcccuggaaguggaca

SEQ ID NO: 22205 - RNA, 20 nt, Artificial Sequence
  HTT spacer sequence GTCN PAM
gguuugguccucagaguccu

SEQ ID NO: 22206 - RNA, 20 nt, Artificial Sequence
  HTT spacer sequence GTCN PAM
ucagaguccuguugcuaaua

SEQ ID NO: 22207 - RNA, 20 nt, Artificial Sequence
  HTT spacer sequence GTCN PAM
uguugcuaauaagcguggag

SEQ ID NO: 22208 - RNA, 20 nt, Artificial Sequence
  HTT spacer sequence GTCN PAM
ucccccuccacgcuuauuag

SEQ ID NO: 22209 - RNA, 20 nt, Artificial Sequence
  HTT spacer sequence GTCN PAM
cuucacucccugagccuugc

SEQ ID NO: 22210 - RNA, 20 nt, Artificial Sequence
  HTT spacer sequence GTCN PAM
ccagcuuaagggaccaaggc

SEQ ID NO: 22211 - RNA, 20 nt, Artificial Sequence
  HTT spacer sequence GTCN PAM
cuuaagcuggagacuagggg

SEQ ID NO: 22212 - RNA, 20 nt, Artificial Sequence
  HTT spacer sequence GTCN PAM
cagccuuggucccuuaagcu

SEQ ID NO: 22213 - RNA, 20 nt, Artificial Sequence
  HTT spacer sequence GTCN PAM
gagaugcugucugccucacc

SEQ ID NO: 22214 - RNA, 20 nt, Artificial Sequence
  HTT spacer sequence GTCN PAM
gccucaccugggcauguggc

SEQ ID NO: 22215 - RNA, 20 nt, Artificial Sequence
  HTT spacer sequence GTCN PAM
aggccacaugcccaggugag

SEQ ID NO: 22216 - RNA, 20 nt, Artificial Sequence
  HTT spacer sequence GTCN PAM
uaguuagaacugccagucca

SEQ ID NO: 22217 - RNA, 20 nt, Artificial Sequence
  HTT spacer sequence GTCN PAM
cucaugucagaaggugggug

SEQ ID NO: 22218 - RNA, 20 nt, Artificial Sequence
  HTT spacer sequence GTCN PAM
gaaggugggugccuucucuu

SEQ ID NO: 22219 - RNA, 20 nt, Artificial Sequence
  HTT spacer sequence GTCN PAM
gacucuauguaaucccaugc

SEQ ID NO: 22220 - RNA, 20 nt, Artificial Sequence
  HTT spacer sequence GTCN PAM
gacagagcauagcuugugca

SEQ ID NO: 22221 - RNA, 20 nt, Artificial Sequence
  HTT spacer sequence GTCN PAM
ugggagcaaucuuccacaug

SEQ ID NO: 22222 - RNA, 20 nt, Artificial Sequence
  HTT spacer sequence GTCN PAM
acgugucuggguggaacaga

SEQ ID NO: 22223 - RNA, 20 nt, Artificial Sequence
  HTT spacer sequence GTCN PAM
ggguggaacagaugucacaa

SEQ ID NO: 22224 - RNA, 20 nt, Artificial Sequence
  HTT spacer sequence GTCN PAM
caaggaugugagucagaggu

SEQ ID NO: 22225 - RNA, 20 nt, Artificial Sequence
  HTT spacer sequence GTCN PAM
gagguggcugccucccuaac

SEQ ID NO: 22226 - RNA, 20 nt, Artificial Sequence
  HTT spacer sequence GTCN PAM
gggcucccaaucuguuaggg

SEQ ID NO: 22227 - RNA, 20 nt, Artificial Sequence
  HTT spacer sequence GTCN PAM
cccucugucugggcucccaa

SEQ ID NO: 22228 - RNA, 20 nt, Artificial Sequence
  HTT spacer sequence GTCN PAM
caugguaucgggcacagggg

SEQ ID NO: 22229 - RNA, 20 nt, Artificial Sequence
  HTT spacer sequence GTCN PAM
cuccacucggccugaagucu

SEQ ID NO: 22230 - RNA, 20 nt, Artificial Sequence
  HTT spacer sequence GTCN PAM
cucuugcacagugucacucc

SEQ ID NO: 22231 - RNA, 20 nt, Artificial Sequence
  HTT spacer sequence GTCN PAM
ggcugaccagccucaccaug

SEQ ID NO: 22232 - RNA, 20 nt, Artificial Sequence
  HTT spacer sequence GTCN PAM
gccggacccugucucucuug

SEQ ID NO: 22233 - RNA, 20 nt, Artificial Sequence
  HTT spacer sequence GTCN PAM
uggugaggcuggucagccgg

SEQ ID NO: 22234 - RNA, 20 nt, Artificial Sequence
  HTT spacer sequence GTCN PAM
ccuucugucccggcaccgcc

SEQ ID NO: 22235 - RNA, 20 nt, Artificial Sequence
  HTT spacer sequence GTCN PAM
cggcaccgccugcuccuguu

SEQ ID NO: 22236 - RNA, 20 nt, Artificial Sequence
  HTT spacer sequence GTCN PAM
cugcggaugcguggaccccg

SEQ ID NO: 22237 - RNA, 20 nt, Artificial Sequence
  HTT spacer sequence GTCN PAM
acgcauccgcagagacucgg

SEQ ID NO: 22238 - RNA, 20 nt, Artificial Sequence
  HTT spacer sequence GTCN PAM
uggguccagcagcuccggga

SEQ ID NO: 22239 - RNA, 20 nt, Artificial Sequence
  HTT spacer sequence GTCN PAM
agcagcuccgggacugcccc

SEQ ID NO: 22240 - RNA, 20 nt, Artificial Sequence
  HTT spacer sequence GTCN PAM
cggagcugcuggacccagga

SEQ ID NO: 22241 - RNA, 20 nt, Artificial Sequence
  HTT spacer sequence GTCN PAM
ucaguuuccccaggaguaac

SEQ ID NO: 22242 - RNA, 20 nt, Artificial Sequence
  HTT spacer sequence GTCN PAM
ggugcucacccuagagaaaa

SEQ ID NO: 22243 - RNA, 20 nt, Artificial Sequence
  HTT spacer sequence GTCN PAM
cgcucaaugcugcugguucc

SEQ ID NO: 22244 - RNA, 20 nt, Artificial Sequence
  HTT spacer sequence GTCN PAM
ugcugagcugggcccugcgg

SEQ ID NO: 22245 - RNA, 20 nt, Artificial Sequence
  HTT spacer sequence GTCN PAM
ccuggccuccuacccagagc

SEQ ID NO: 22246 - RNA, 20 nt, Artificial Sequence
  HTT spacer sequence GTCN PAM
uuaagguuggugggcuuccu

SEQ ID NO: 22247 - RNA, 20 nt, Artificial Sequence
  HTT spacer sequence GTCN PAM
cccagagccuggggccaccu

SEQ ID NO: 22248 - RNA, 20 nt, Artificial Sequence
  HTT spacer sequence GTCN PAM
uaaucgggagaacaaaacga

SEQ ID NO: 22249 - RNA, 20 nt, Artificial Sequence
  HTT spacer sequence GTCN PAM
acuguguucugagugcgcca

SEQ ID NO: 22250 - RNA, 20 nt, Artificial Sequence
  HTT spacer sequence GTCN PAM
agcagccuagcccuccuauc

SEQ ID NO: 22251 - RNA, 20 nt, Artificial Sequence
  HTT spacer sequence GTCN PAM
ccucuugugauaggagggcu

SEQ ID NO: 22252 - RNA, 20 nt, Artificial Sequence
  HTT spacer sequence GTCN PAM
cacgcaucccaggagggucu

SEQ ID NO: 22253 - RNA, 20 nt, Artificial Sequence
  HTT spacer sequence GTCN PAM
gguuggcgggagcccucugc

SEQ ID NO: 22254 - RNA, 20 nt, Artificial Sequence
  HTT spacer sequence GTCN PAM
gcagccaggcuggugugggc

SEQ ID NO: 22255 - RNA, 20 nt, Artificial Sequence
  HTT spacer sequence GTCN PAM
cggccacagcugaucugcuc

SEQ ID NO: 22256 - RNA, 20 nt, Artificial Sequence
  HTT spacer sequence GTCN PAM
cugagcagaucagcuguggc

SEQ ID NO: 22257 - RNA, 20 nt, Artificial Sequence
  HTT spacer sequence GTCN PAM
cccuggaggcccaggcugcg

SEQ ID NO: 22258 - RNA, 20 nt, Artificial Sequence
  HTT spacer sequence GTCN PAM
cccgagauggaagaaguggg

SEQ ID NO: 22259 - RNA, 20 nt, Artificial Sequence
  HTT spacer sequence GTCN PAM
acaccccagcuggcuggaac

SEQ ID NO: 22260 - RNA, 20 nt, Artificial Sequence
  HTT spacer sequence GTCN PAM
guucaugcugcaggaggcac

SEQ ID NO: 22261 - RNA, 20 nt, Artificial Sequence
  HTT spacer sequence GTCN PAM
cacugggcacuguucaggca

SEQ ID NO: 22262 - RNA, 20 nt, Artificial Sequence
  HTT spacer sequence GTCN PAM
uuggugccugaacagugccc

SEQ ID NO: 22263 - RNA, 20 nt, Artificial Sequence
  HTT spacer sequence GTCN PAM
cccauguccuuggugccuga

SEQ ID NO: 22264 - RNA, 20 nt, Artificial Sequence
  HTT spacer sequence GTCN PAM
gucccccauguccuuggugc

SEQ ID NO: 22265 - RNA, 20 nt, Artificial Sequence
  HTT spacer sequence GTCN PAM
ggggaggggcagauagccaa

SEQ ID NO: 22266 - RNA, 20 nt, Artificial Sequence
  HTT spacer sequence GTCN PAM
guuggcuaucugccccuccc

SEQ ID NO: 22267 - RNA, 20 nt, Artificial Sequence
  HTT spacer sequence GTCN PAM
gggggugccgggugggggcu

SEQ ID NO: 22268 - RNA, 20 nt, Artificial Sequence
  HTT spacer sequence GTCN PAM
acggcagggcccccacuccu

SEQ ID NO: 22269 - RNA, 20 nt, Artificial Sequence
  HTT spacer sequence GTCN PAM
agcccaggggaguguggucu

SEQ ID NO: 22270 - RNA, 20 nt, Artificial Sequence
  HTT spacer sequence GTCN PAM
agaugaggggccaaggggca

SEQ ID NO: 22271 - RNA, 20 nt, Artificial Sequence
  HTT spacer sequence GTCN PAM
gugccaagggccgcggggag

SEQ ID NO: 22272 - RNA, 20 nt, Artificial Sequence
  HTT spacer sequence GTCN PAM
ccccgcggcccuuggcacag

SEQ ID NO: 22273 - RNA, 20 nt, Artificial Sequence
  HTT spacer sequence GTCN PAM
ggccgugcuuuuccuuccug

SEQ ID NO: 22274 - RNA, 20 nt, Artificial Sequence
  HTT spacer sequence GTCN PAM
agggaagggaggaaccgccc

SEQ ID NO: 22275 - RNA, 20 nt, Artificial Sequence
  HTT spacer sequence GTCN PAM
gcgugcaggcuuugguggga

SEQ ID NO: 22276 - RNA, 20 nt, Artificial Sequence
  HTT spacer sequence GTCN PAM
caugcauagagcggcccucu

SEQ ID NO: 22277 - RNA, 20 nt, Artificial Sequence
  HTT spacer sequence GTCN PAM
ugccccacccaguggcuccc

SEQ ID NO: 22278 - RNA, 20 nt, Artificial Sequence
  HTT spacer sequence GTCN PAM
cgagaggggcggcaguccug

SEQ ID NO: 22279 - RNA, 20 nt, Artificial Sequence
  HTT spacer sequence GTCN PAM
cucaccgcagccagccuggg

SEQ ID NO: 22280 - RNA, 20 nt, Artificial Sequence
  HTT spacer sequence GTCN PAM
accaccccaaguuccuggcu

SEQ ID NO: 22281 - RNA, 20 nt, Artificial Sequence
  HTT spacer sequence GTCN PAM
ugauguguggggugggccgg

SEQ ID NO: 22282 - RNA, 20 nt, Artificial Sequence
  HTT spacer sequence GTCN PAM
guguuugugaagaacugaag

SEQ ID NO: 22283 - RNA, 20 nt, Artificial Sequence
  HTT spacer sequence GTCN PAM
caaaccacaagcagcagagg

SEQ ID NO: 22284 - RNA, 20 nt, Artificial Sequence
  HTT spacer sequence GTCN PAM
gggggaagccacggcuggca

SEQ ID NO: 22285 - RNA, 20 nt, Artificial Sequence
  HTT spacer sequence GTCN PAM
ccagccccaccucaccgucu

SEQ ID NO: 22286 - RNA, 20 nt, Artificial Sequence
  HTT spacer sequence GTCN PAM
ccagccccaccucacccuca

SEQ ID NO: 22287 - RNA, 20 nt, Artificial Sequence
  HTT spacer sequence GTCN PAM
cgacucccaugcccaucuca

SEQ ID NO: 22288 - RNA, 20 nt, Artificial Sequence
  HTT spacer sequence GTCN PAM
ggacugcccgggggccucca

SEQ ID NO: 22289 - RNA, 20 nt, Artificial Sequence
  HTT spacer sequence GTCN PAM
ccaggaaagguucuugagau

SEQ ID NO: 22290 - RNA, 20 nt, Artificial Sequence
  HTT spacer sequence GTCN PAM
cuguccccaggaaagguucu

SEQ ID NO: 22291 - RNA, 20 nt, Artificial Sequence
  HTT spacer sequence GTCN PAM
ucagagggaagcugcaaugu

SEQ ID NO: 22292 - RNA, 20 nt, Artificial Sequence
  HTT spacer sequence GTCN PAM
gcauuuuucuuaauucccuu

SEQ ID NO: 22293 - RNA, 20 nt, Artificial Sequence
  HTT spacer sequence GTCN PAM
guugcacacagcaguggccu

SEQ ID NO: 22294 - RNA, 20 nt, Artificial Sequence
  HTT spacer sequence GTCN PAM
ggccacugcugugugcaacg

SEQ ID NO: 22295 - RNA, 20 nt, Artificial Sequence
  HTT spacer sequence GTCN PAM
cugccuccacccugcaccgc

SEQ ID NO: 22296 - RNA, 20 nt, Artificial Sequence
  HTT spacer sequence GTCN PAM
ucugggaacacugcugucuc

SEQ ID NO: 22297 - RNA, 20 nt, Artificial Sequence
  HTT spacer sequence GTCN PAM
ccagugcaccagccuuucuc

SEQ ID NO: 22298 - RNA, 20 nt, Artificial Sequence
  HTT spacer sequence GTCN PAM
cacugggcagagguccaggg

SEQ ID NO: 22299 - RNA, 20 nt, Artificial Sequence
  HTT spacer sequence GTCN PAM
agggguguggaagggccuca

SEQ ID NO: 22300 - RNA, 20 nt, Artificial Sequence
  HTT spacer sequence GTCN PAM
aauuagcgcuaagucacaau

SEQ ID NO: 22301 - RNA, 20 nt, Artificial Sequence
  HTT spacer sequence GTCN PAM
caauuuuuucacucugagcu

SEQ ID NO: 22302 - RNA, 20 nt, Artificial Sequence
  HTT spacer sequence GTCN PAM
ggccucauguauggacauga

SEQ ID NO: 22303 - RNA, 20 nt, Artificial Sequence
  HTT spacer sequence GTCN PAM
auacaugaggccagacccca

SEQ ID NO: 22304 - RNA, 20 nt, Artificial Sequence
  HTT spacer sequence GTCN PAM
uguccauacaugaggccaga

SEQ ID NO: 22305 - RNA, 20 nt, Artificial Sequence
  HTT spacer sequence GTCN PAM
gucuguccuucucuuggguc

SEQ ID NO: 22306 - RNA, 20 nt, Artificial Sequence
  HTT spacer sequence GTCN PAM
guccuucucuuggguccugc

SEQ ID NO: 22307 - RNA, 20 nt, Artificial Sequence
  HTT spacer sequence GTCN PAM
uucucuuggguccugccaug

SEQ ID NO: 22308 - RNA, 20 nt, Artificial Sequence
  HTT spacer sequence GTCN PAM
ugccaugggccuggugccca

SEQ ID NO: 22309 - RNA, 20 nt, Artificial Sequence
  HTT spacer sequence GTCN PAM
cacugaaucuccaaggccca

SEQ ID NO: 22310 - RNA, 20 nt, Artificial Sequence
  HTT spacer sequence GTCN PAM
aagucccacugaaucuccaa

SEQ ID NO: 22311 - RNA, 20 nt, Artificial Sequence
  HTT spacer sequence GTCN PAM
cuggcacuccccacgggucc

SEQ ID NO: 22312 - RNA, 20 nt, Artificial Sequence
  HTT spacer sequence GTCN PAM
auggcacaguucugccacca

SEQ ID NO: 22313 - RNA, 20 nt, Artificial Sequence
  HTT spacer sequence GTCN PAM
ccuccacauggaaaccaaac

SEQ ID NO: 22314 - RNA, 20 nt, Artificial Sequence
  HTT spacer sequence GTCN PAM
ugcacuugccccauccuggu

SEQ ID NO: 22315 - RNA, 20 nt, Artificial Sequence
  HTT spacer sequence GTCN PAM
agugucgggggcccagggca

SEQ ID NO: 22316 - RNA, 20 nt, Artificial Sequence
  HTT spacer sequence GTCN PAM
ggggcccagggcaggaaggg

SEQ ID NO: 22317 - RNA, 20 nt, Artificial Sequence
  HTT spacer sequence GTCN PAM
acguggauggggugcggcgc

SEQ ID NO: 22318 - RNA, 20 nt, Artificial Sequence
  HTT spacer sequence GTCN PAM
caggccacauucaccacggc

SEQ ID NO: 22319 - RNA, 20 nt, Artificial Sequence
  HTT spacer sequence GTCN PAM
gcaagccuggcggguguggg

SEQ ID NO: 22320 - RNA, 20 nt, Artificial Sequence
  HTT spacer sequence GTCN PAM
ggcauggcaggugaggcugg

SEQ ID NO: 22321 - RNA, 20 nt, Artificial Sequence
  HTT spacer sequence GTCN PAM
accagccucaccugccaugc

SEQ ID NO: 22322 - RNA, 20 nt, Artificial Sequence
  HTT spacer sequence GTCN PAM
cagccuuguggagccugucu

SEQ ID NO: 22323 - RNA, 20 nt, Artificial Sequence
  HTT spacer sequence GTCN PAM
cucccugacaggcacgccca

SEQ ID NO: 22324 - RNA, 20 nt, Artificial Sequence
  HTT spacer sequence GTCN PAM
cgugcugaaaagagaccucc

SEQ ID NO: 22325 - RNA, 20 nt, Artificial Sequence
  HTT spacer sequence GTCN PAM
cuuuucagcacgagacaaac

SEQ ID NO: 22326 - RNA, 20 nt, Artificial Sequence
  HTT spacer sequence GTCN PAM
ugauaaaaugucaccugcag

SEQ ID NO: 22327 - RNA, 20 nt, Artificial Sequence
  HTT spacer sequence GTCN PAM
ccugcagccacgcgugcggc

SEQ ID NO: 22328 - RNA, 20 nt, Artificial Sequence
  HTT spacer sequence GTCN PAM
ugccgcacgcguggcugcag

SEQ ID NO: 22329 - RNA, 20 nt, Artificial Sequence
  HTT spacer sequence GTCN PAM
cucuccacgggaacucaggg

SEQ ID NO: 22330 - RNA, 20 nt, Artificial Sequence
  HTT spacer sequence GTCN PAM
agggaacugcuggccugucc

SEQ ID NO: 22331 - RNA, 20 nt, Artificial Sequence
  HTT spacer sequence GTCN PAM
uuguccccauggucccaguc

SEQ ID NO: 22332 - RNA, 20 nt, Artificial Sequence
  HTT spacer sequence GTCN PAM
ccauggucccagucucacug

SEQ ID NO: 22333 - RNA, 20 nt, Artificial Sequence
  HTT spacer sequence GTCN PAM
cagucucacugucacugugu

SEQ ID NO: 22334 - RNA, 20 nt, Artificial Sequence
  HTT spacer sequence GTCN PAM
cacugucacugugugcucau

SEQ ID NO: 22335 - RNA, 20 nt, Artificial Sequence
  HTT spacer sequence GTCN PAM
cugugugcucauguuugaug

SEQ ID NO: 22336 - RNA, 20 nt, Artificial Sequence
  HTT spacer sequence GTCN PAM
ccagcacagagcccucccca

SEQ ID NO: 22337 - RNA, 20 nt, Artificial Sequence
  HTT spacer sequence GTCN PAM
gcccuggccaggugguaucu

SEQ ID NO: 22338 - RNA, 20 nt, Artificial Sequence
  HTT spacer sequence GTCN PAM
ccaggcugccacugugcaga

SEQ ID NO: 22339 - RNA, 20 nt, Artificial Sequence
  HTT spacer sequence GTCN PAM
caaagagccuuggacccuuc

SEQ ID NO: 22340 - RNA, 20 nt, Artificial Sequence
  HTT spacer sequence GTCN PAM
aaggcucuuugagacccuca

SEQ ID NO: 22341 - RNA, 20 nt, Artificial Sequence
  HTT spacer sequence GTCN PAM
guggagccauucauucagcu

SEQ ID NO: 22342 - RNA, 20 nt, Artificial Sequence
  HTT spacer sequence GTCN PAM
gggcuucuguuuguuuuuua

SEQ ID NO: 22343 - RNA, 20 nt, Artificial Sequence
  HTT spacer sequence GTCN PAM
cugaaggaguaaguaagucu

SEQ ID NO: 22344 - RNA, 20 nt, Artificial Sequence
  HTT spacer sequence GTCN PAM
ggaggagcugccugagcuuc

SEQ ID NO: 22345 - RNA, 20 nt, Artificial Sequence
  HTT spacer sequence GTCN PAM
cccuggacuggcggggggug

SEQ ID NO: 22346 - RNA, 20 nt, Artificial Sequence
  HTT spacer sequence GTCN PAM
agggagacccuguggguggg

SEQ ID NO: 22347 - RNA, 20 nt, Artificial Sequence
  HTT spacer sequence GTCN PAM
ggcagugggcaggggccuga

SEQ ID NO: 22348 - RNA, 20 nt, Artificial Sequence
  HTT spacer sequence GTCN PAM
ggccccugcccacugccuga

SEQ ID NO: 22349 - RNA, 20 nt, Artificial Sequence
  HTT spacer sequence GTCN PAM
gugccggguaacucagcuuc

SEQ ID NO: 22350 - RNA, 20 nt, Artificial Sequence
  HTT spacer sequence GTCN PAM
gggcucuuuuugcuccccuu

SEQ ID NO: 22351 - RNA, 20 nt, Artificial Sequence
  HTT spacer sequence GTCN PAM
cuccgcaguguacuggcugg

SEQ ID NO: 22352 - RNA, 20 nt, Artificial Sequence
  HTT spacer sequence GTCN PAM
cccaguccccgagggggcug

SEQ ID NO: 22353 - RNA, 20 nt, Artificial Sequence
  HTT spacer sequence GTCN PAM
ccgagggggcuggcacuugg

SEQ ID NO: 22354 - RNA, 20 nt, Artificial Sequence
  HTT spacer sequence GTCN PAM
uggguacacugcgcagccua

SEQ ID NO: 22355 - RNA, 20 nt, Artificial Sequence
  HTT spacer sequence GTCN PAM
ggcaccacugcccuucuccc

SEQ ID NO: 22356 - RNA, 20 nt, Artificial Sequence
  HTT spacer sequence GTCN PAM
cuggcuauggugagcccccu

SEQ ID NO: 22357 - RNA, 20 nt, Artificial Sequence
  HTT spacer sequence GTCN PAM
uccguggucgcuggcuaugg

SEQ ID NO: 22358 - RNA, 20 nt, Artificial Sequence
  HTT spacer sequence GTCN PAM
cccaccagccgccgccguug

SEQ ID NO: 22359 - RNA, 20 nt, Artificial Sequence
  HTT spacer sequence GTCN PAM
gcccaggggagggugcauca

SEQ ID NO: 22360 - RNA, 20 nt, Artificial Sequence
  HTT spacer sequence GTCN PAM
ccagccgaugaggaggaagg

SEQ ID NO: 22361 - RNA, 20 nt, Artificial Sequence
  HTT spacer sequence GTCN PAM
ugcagggcacgggcugugcu

SEQ ID NO: 22362 - RNA, 20 nt, Artificial Sequence
  HTT spacer sequence GTCN PAM
ccugaguccugcagggcacg

SEQ ID NO: 22363 - RNA, 20 nt, Artificial Sequence
  HTT spacer sequence GTCN PAM
cccugaaauaacgccccugc

SEQ ID NO: 22364 - RNA, 20 nt, Artificial Sequence
  HTT spacer sequence GTCN PAM
ccagauggggacccaccuac

SEQ ID NO: 22365 - RNA, 20 nt, Artificial Sequence
  HTT spacer sequence GTCN PAM
ccaucuggcgacggccugcu

SEQ ID NO: 22366 - RNA, 20 nt, Artificial Sequence
  HTT spacer sequence GTCN PAM
acuuccucuaccucuuccug

SEQ ID NO: 22367 - RNA, 20 nt, Artificial Sequence
  HTT spacer sequence GTCN PAM
ccuucucagcacgcgccacc

SEQ ID NO: 22368 - RNA, 20 nt, Artificial Sequence
  HTT spacer sequence GTCN PAM
aguccuuacugucuccagag

SEQ ID NO: 22369 - RNA, 20 nt, Artificial Sequence
  HTT spacer sequence GTCN PAM
uuacugucuccagagggugg

SEQ ID NO: 22370 - RNA, 20 nt, Artificial Sequence
  HTT spacer sequence GTCN PAM
ccagaggguggguccuggcc

SEQ ID NO: 22371 - RNA, 20 nt, Artificial Sequence
  HTT spacer sequence GTCN PAM
uggccacgagcgacagccga

SEQ ID NO: 22372 - RNA, 20 nt, Artificial Sequence
  HTT spacer sequence GTCN PAM
cucguggccaggacccaccc

SEQ ID NO: 22373 - RNA, 20 nt, Artificial Sequence
  HTT spacer sequence GTCN PAM
guggguugccaggccagcag

SEQ ID NO: 22374 - RNA, 20 nt, Artificial Sequence
  HTT spacer sequence GTCN PAM
caacaccaagagagcggccc

SEQ ID NO: 22375 - RNA, 20 nt, Artificial Sequence
  HTT spacer sequence GTCN PAM
cagaccacagcccuacccgu

SEQ ID NO: 22376 - RNA, 20 nt, Artificial Sequence
  HTT spacer sequence GTCN PAM
gggacccacaggccuagggg

SEQ ID NO: 22377 - RNA, 20 nt, Artificial Sequence
  HTT spacer sequence GTCN PAM
cuggcaggaagcagaagaug

SEQ ID NO: 22378 - RNA, 20 nt, Artificial Sequence
  HTT spacer sequence GTCN PAM
gaggcugcgaagagcagggc

SEQ ID NO: 22379 - RNA, 20 nt, Artificial Sequence
  HTT spacer sequence GTCN PAM
uugggguggccuucucacug

SEQ ID NO: 22380 - RNA, 20 nt, Artificial Sequence
  HTT spacer sequence GTCN PAM
uuucccuaggcggucauugg

SEQ ID NO: 22381 - RNA, 20 nt, Artificial Sequence
  HTT spacer sequence GTCN PAM
cccugugcagcucggguggu

SEQ ID NO: 22382 - RNA, 20 nt, Artificial Sequence
  HTT spacer sequence GTCN PAM
ccaccaggaccccaaaggcc

SEQ ID NO: 22383 - RNA, 20 nt, Artificial Sequence
  HTT spacer sequence GTCN PAM
ugguggugacuucugggccu

SEQ ID NO: 22384 - RNA, 20 nt, Artificial Sequence
  HTT spacer sequence GTCN PAM
aggcaugguaagugcacagg

SEQ ID NO: 22385 - RNA, 20 nt, Artificial Sequence
  HTT spacer sequence GTCN PAM
gcaacgauggccguggagag

SEQ ID NO: 22386 - RNA, 20 nt, Artificial Sequence
  HTT spacer sequence GTCN PAM
gccucuccacggccaucguu

SEQ ID NO: 22387 - RNA, 20 nt, Artificial Sequence
  HTT spacer sequence GTCN PAM
gggccaccucucggagcuuu

SEQ ID NO: 22388 - RNA, 20 nt, Artificial Sequence
  HTT spacer sequence GTCN PAM
cuuaaggccaggaguggcuc

SEQ ID NO: 22389 - RNA, 20 nt, Artificial Sequence
  HTT spacer sequence GTCN PAM
ggguugccaagcccuacucu

SEQ ID NO: 22390 - RNA, 20 nt, Artificial Sequence
  HTT spacer sequence GTCN PAM
cccgagaacccccuccagga

SEQ ID NO: 22391 - RNA, 20 nt, Artificial Sequence
  HTT spacer sequence GTCN PAM
gagguggccccagugagugg

SEQ ID NO: 22392 - RNA, 20 nt, Artificial Sequence
  HTT spacer sequence GTCN PAM
ugcaguuucugugugcgcca

SEQ ID NO: 22393 - RNA, 20 nt, Artificial Sequence
  HTT spacer sequence GTCN PAM
cauuggcucggcauucucug

SEQ ID NO: 22394 - RNA, 20 nt, Artificial Sequence
  HTT spacer sequence GTCN PAM
cucaggucucauuggcucgg

SEQ ID NO: 22395 - RNA, 20 nt, Artificial Sequence
  HTT spacer sequence GTCN PAM
ccaucauggggcugccuggc

SEQ ID NO: 22396 - RNA, 20 nt, Artificial Sequence
  HTT spacer sequence GTCN PAM
uggggcccucaaggccaaug

SEQ ID NO: 22397 - RNA, 20 nt, Artificial Sequence
  HTT spacer sequence GTCN PAM
agccccguccugagggucca

SEQ ID NO: 22398 - RNA, 20 nt, Artificial Sequence
  HTT spacer sequence GTCN PAM
ugaggguccagucaugcugg

SEQ ID NO: 22399 - RNA, 20 nt, Artificial Sequence
  HTT spacer sequence GTCN PAM
agucaugcugggcccuacac

SEQ ID NO: 22400 - RNA, 20 nt, Artificial Sequence
  HTT spacer sequence GTCN PAM
ugcugggcccuacacucaca

SEQ ID NO: 22401 - RNA, 20 nt, Artificial Sequence
  HTT spacer sequence GTCN PAM
cguucagauccuuccucauc

SEQ ID NO: 22402 - RNA, 20 nt, Artificial Sequence
  HTT spacer sequence GTCN PAM
uggcuucugggcaugauccc

SEQ ID NO: 22403 - RNA, 20 nt, Artificial Sequence
  HTT spacer sequence GTCN PAM
ggugcccuugcccacauguc

SEQ ID NO: 22404 - RNA, 20 nt, Artificial Sequence
  HTT spacer sequence GTCN PAM
uugccuucccacucccuggg

SEQ ID NO: 22405 - RNA, 20 nt, Artificial Sequence
  HTT spacer sequence GTCN PAM
agcccaggccccuccccaau

SEQ ID NO: 22406 - RNA, 20 nt, Artificial Sequence
  HTT spacer sequence GTCN PAM
accaaacauaggaccguaga

SEQ ID NO: 22407 - RNA, 20 nt, Artificial Sequence
  HTT spacer sequence GTCN PAM
uauguuugguggacgugguc

SEQ ID NO: 22408 - RNA, 20 nt, Artificial Sequence
  HTT spacer sequence GTCN PAM
uguucggagguauggcuggc

SEQ ID NO: 22409 - RNA, 20 nt, Artificial Sequence
  HTT spacer sequence GTCN PAM
accccgcccugccaggagcc

SEQ ID NO: 22410 - RNA, 20 nt, Artificial Sequence
  HTT spacer sequence GTCN PAM
uaggggaugaggaaucacga

SEQ ID NO: 22411 - RNA, 20 nt, Artificial Sequence
  HTT spacer sequence GTCN PAM
gaugggccuggggggcaggg

SEQ ID NO: 22412 - RNA, 20 nt, Artificial Sequence
  HTT spacer sequence GTCN PAM
uugcccugcggcccacagug

SEQ ID NO: 22413 - RNA, 20 nt, Artificial Sequence
  HTT spacer sequence GTCN PAM
agcaggaggccgagaaagac

SEQ ID NO: 22414 - RNA, 20 nt, Artificial Sequence
  HTT spacer sequence GTCN PAM
uucucggccuccugcuggac

SEQ ID NO: 22415 - RNA, 20 nt, Artificial Sequence
  HTT spacer sequence GTCN PAM
ccguugucuuucucggccuc

SEQ ID NO: 22416 - RNA, 20 nt, Artificial Sequence
  HTT spacer sequence GTCN PAM
gagcagcccaccaugggaug

SEQ ID NO: 22417 - RNA, 20 nt, Artificial Sequence
  HTT spacer sequence GTCN PAM
gguuagcggggaagccgagu

SEQ ID NO: 22418 - RNA, 20 nt, Artificial Sequence
  HTT spacer sequence GTCN PAM
uccggggccuggcauacccc

SEQ ID NO: 22419 - RNA, 20 nt, Artificial Sequence
  HTT spacer sequence GTCN PAM
gguguggggguaugccaggc

SEQ ID NO: 22420 - RNA, 20 nt, Artificial Sequence
  HTT spacer sequence GTCN PAM
guaggccagagccccugcca

SEQ ID NO: 22421 - RNA, 20 nt, Artificial Sequence
  HTT spacer sequence GTCN PAM
ugagagaccagggugagcac

SEQ ID NO: 22422 - RNA, 20 nt, Artificial Sequence
  HTT spacer sequence GTCN PAM
cucaggaccguugccuuugc

SEQ ID NO: 22423 - RNA, 20 nt, Artificial Sequence
  HTT spacer sequence GTCN PAM
gcgaugugcucacccugguc

SEQ ID NO: 22424 - RNA, 20 nt, Artificial Sequence
  HTT spacer sequence GTCN PAM
gggccaggggccggaaucgc

SEQ ID NO: 22425 - RNA, 20 nt, Artificial Sequence
  HTT spacer sequence GTCN PAM
cccuggcgggggccaugggg

SEQ ID NO: 22426 - RNA, 20 nt, Artificial Sequence
  HTT spacer sequence GTCN PAM
ggugugcaccccauggcccc

SEQ ID NO: 22427 - RNA, 20 nt, Artificial Sequence
  HTT spacer sequence GTCN PAM
cggucccgcccccaccccgc

SEQ ID NO: 22428 - RNA, 20 nt, Artificial Sequence
  HTT spacer sequence GTCN PAM
cgcccccaccccgcgcgccc

SEQ ID NO: 22429 - RNA, 20 nt, Artificial Sequence
  HTT spacer sequence GTCN PAM
cgccccccacccugcgcguc

SEQ ID NO: 22430 - RNA, 20 nt, Artificial Sequence
  HTT spacer sequence GTCN PAM
ccggucccgucccccacccu

SEQ ID NO: 22431 - RNA, 20 nt, Artificial Sequence
  HTT spacer sequence GTCN PAM
cgucccccacccugcgcgcc

SEQ ID NO: 22432 - RNA, 20 nt, Artificial Sequence
  HTT spacer sequence GTCN PAM
cccacccugcgcgcccucua

SEQ ID NO: 22433 - RNA, 20 nt, Artificial Sequence
  HTT spacer sequence GTCN PAM
agccccacaccccgcgcgcc

SEQ ID NO: 22434 - RNA, 20 nt, Artificial Sequence
  HTT spacer sequence GTCN PAM
cgucuccucccccaccccgc

SEQ ID NO: 22435 - RNA, 20 nt, Artificial Sequence
  HTT spacer sequence GTCN PAM
ccucccccaccccgcgcguc

SEQ ID NO: 22436 - RNA, 20 nt, Artificial Sequence
  HTT spacer sequence GTCN PAM
ccugucccacccccaacccg

SEQ ID NO: 22437 - RNA, 20 nt, Artificial Sequence
  HTT spacer sequence GTCN PAM
cacccccaacccgagcgccc

SEQ ID NO: 22438 - RNA, 20 nt, Artificial Sequence
  HTT spacer sequence GTCN PAM
cgccccgcaccugccgcggc

SEQ ID NO: 22439 - RNA, 20 nt, Artificial Sequence
  HTT spacer sequence GTCN PAM
cgagcgcgcagccgcggcag

SEQ ID NO: 22440 - RNA, 20 nt, Artificial Sequence
  HTT spacer sequence GTCN PAM
gucccgagcgcgcagccgcg

SEQ ID NO: 22441 - RNA, 20 nt, Artificial Sequence
  HTT spacer sequence GTCN PAM
cacagacgcggaacagggca

SEQ ID NO: 22442 - RNA, 20 nt, Artificial Sequence
  HTT spacer sequence GTCN PAM
gugcgaccguccgucccgag

SEQ ID NO: 22443 - RNA, 20 nt, Artificial Sequence
  HTT spacer sequence GTCN PAM
cgccccuggcggcgugccug

SEQ ID NO: 22444 - RNA, 20 nt, Artificial Sequence
  HTT spacer sequence GTCN PAM
cuuccggggcguggcguggc

SEQ ID NO: 22445 - RNA, 20 nt, Artificial Sequence
  HTT spacer sequence GTCN PAM
guggcgggguucucgccggu

SEQ ID NO: 22446 - RNA, 20 nt, Artificial Sequence
  HTT spacer sequence GTCN PAM
ugcgggucgcugcuuggcug

SEQ ID NO: 22447 - RNA, 20 nt, Artificial Sequence
  HTT spacer sequence GTCN PAM
cugcuuggcuguggguuagc

SEQ ID NO: 22448 - RNA, 20 nt, Artificial Sequence
  HTT spacer sequence GTCN PAM
cggccucgggguuacgcggc

SEQ ID NO: 22449 - RNA, 20 nt, Artificial Sequence
  HTT spacer sequence GTCN PAM
ugggcccaaggaggccaggc

SEQ ID NO: 22450 - RNA, 20 nt, Artificial Sequence
  HTT spacer sequence GTCN PAM
gcuccgcggggcaggcgucg

SEQ ID NO: 22451 - RNA, 20 nt, Artificial Sequence
  HTT spacer sequence GTCN PAM
cccaucgucugcgcccugcg

SEQ ID NO: 22452 - RNA, 20 nt, Artificial Sequence
  HTT spacer sequence GTCN PAM
gcgcccugcgggccuggccc

SEQ ID NO: 22453 - RNA, 20 nt, Artificial Sequence
  HTT spacer sequence GTCN PAM
uuccacggggagggccaggc

SEQ ID NO: 22454 - RNA, 20 nt, Artificial Sequence
  HTT spacer sequence GTCN PAM
gccccccagcguggggcccc

SEQ ID NO: 22455 - RNA, 20 nt, Artificial Sequence
  HTT spacer sequence GTCN PAM
gcucacgcagcccgagcaga

SEQ ID NO: 22456 - RNA, 20 nt, Artificial Sequence
  HTT spacer sequence GTCN PAM
caggacaggcggcugagggg

SEQ ID NO: 22457 - RNA, 20 nt, Artificial Sequence
  HTT spacer sequence GTCN PAM
ugggacuucaggcucagcac

SEQ ID NO: 22458 - RNA, 20 nt, Artificial Sequence
  HTT spacer sequence GTCN PAM
cugcccacccaauucacacc

SEQ ID NO: 22459 - RNA, 20 nt, Artificial Sequence
  HTT spacer sequence GTCN PAM
uguggcuuucaguugucucu

SEQ ID NO: 22460 - RNA, 20 nt, Artificial Sequence
  HTT spacer sequence GTCN PAM
cccgaaggaggagcuggcgc

SEQ ID NO: 22461 - RNA, 20 nt, Artificial Sequence
  HTT spacer sequence GTCN PAM
ggugcuucugcgcccggaaa

SEQ ID NO: 22462 - RNA, 20 nt, Artificial Sequence
  HTT spacer sequence GTCN PAM
cucugggcaggagaagcuuu

SEQ ID NO: 22463 - RNA, 20 nt, Artificial Sequence
  HTT spacer sequence GTCN PAM
gccacgugagauccgcaagc

SEQ ID NO: 22464 - RNA, 20 nt, Artificial Sequence
  HTT spacer sequence GTCN PAM
uuuuggcugcagguggaaaa

SEQ ID NO: 22465 - RNA, 20 nt, Artificial Sequence
  HTT spacer sequence GTCN PAM
ucugggaaaaaagcuaauaa

SEQ ID NO: 22466 - RNA, 20 nt, Artificial Sequence
  HTT spacer sequence GTCN PAM
gcaaauuuugcaauggcagu

SEQ ID NO: 22467 - RNA, 20 nt, Artificial Sequence
  HTT spacer sequence GTCN PAM
cacaaaagcaggcuaauccc

SEQ ID NO: 22468 - RNA, 20 nt, Artificial Sequence
  HTT spacer sequence GTCN PAM
cgcagcgggaggcuacagga

SEQ ID NO: 22469 - RNA, 20 nt, Artificial Sequence
  HTT spacer sequence GTCN PAM
gaauccuguagccucccgcu

SEQ ID NO: 22470 - RNA, 20 nt, Artificial Sequence
  HTT spacer sequence GTCN PAM
ccuggcaccacccaggcuca

SEQ ID NO: 22471 - RNA, 20 nt, Artificial Sequence
  HTT spacer sequence GTCN PAM
guuccugggugccacaacau

SEQ ID NO: 22472 - RNA, 20 nt, Artificial Sequence
  HTT spacer sequence GTCN PAM
aagcuguuuucgcacugagu

SEQ ID NO: 22473 - RNA, 20 nt, Artificial Sequence
  HTT spacer sequence GTCN PAM
gagaugaaaucacagggagu

SEQ ID NO: 22474 - RNA, 20 nt, Artificial Sequence
  HTT spacer sequence GTCN PAM
ggucagagaugaaaucacag

SEQ ID NO: 22475 - RNA, 20 nt, Artificial Sequence
  HTT spacer sequence GTCN PAM
gaaguacccauuggucaggu

SEQ ID NO: 22476 - RNA, 20 nt, Artificial Sequence
  HTT spacer sequence GTCN PAM
cccugagcaucugggguuug

SEQ ID NO: 22477 - RNA, 20 nt, Artificial Sequence
  HTT spacer sequence GTCN PAM
cccacacagcuagcucugcg

SEQ ID NO: 22478 - RNA, 20 nt, Artificial Sequence
  HTT spacer sequence GTCN PAM
agguaacagggaaggugaac

SEQ ID NO: 22479 - RNA, 20 nt, Artificial Sequence
  HTT spacer sequence GTCN PAM
uugaagagggcgcgugaucc

SEQ ID NO: 22480 - RNA, 20 nt, Artificial Sequence
  HTT spacer sequence GTCN PAM
ugucauugaagagggcgcgu

SEQ ID NO: 22481 - RNA, 20 nt, Artificial Sequence
  HTT spacer sequence GTCN PAM
uggaucgcauagcaaggccu

SEQ ID NO: 22482 - RNA, 20 nt, Artificial Sequence
  HTT spacer sequence GTCN PAM
auugaggccuugcuaugcga

SEQ ID NO: 22483 - RNA, 20 nt, Artificial Sequence
  HTT spacer sequence GTCN PAM
ggucccacuuuuuuuucugu

SEQ ID NO: 22484 - RNA, 20 nt, Artificial Sequence
  HTT spacer sequence GTCN PAM
cacuuuuuuuucuguccugu

SEQ ID NO: 22485 - RNA, 20 nt, Artificial Sequence
  HTT spacer sequence GTCN PAM
uguucucguuuccucuuugc

SEQ ID NO: 22486 - RNA, 20 nt, Artificial Sequence
  HTT spacer sequence GTCN PAM
ugagugcaaaggcuuggcuu

SEQ ID NO: 22487 - RNA, 20 nt, Artificial Sequence
  HTT spacer sequence GTCN PAM
cuguguaggcccaggauuuc

SEQ ID NO: 22488 - RNA, 20 nt, Artificial Sequence
  HTT spacer sequence GTCN PAM
auauacacuuugucacugug

SEQ ID NO: 22489 - RNA, 20 nt, Artificial Sequence
  HTT spacer sequence GTCN PAM
cauccaccaacuaggcuggc

SEQ ID NO: 22490 - RNA, 20 nt, Artificial Sequence
  HTT spacer sequence GTCN PAM
gggguugucacauccaccaa

SEQ ID NO: 22491 - RNA, 20 nt, Artificial Sequence
  HTT spacer sequence GTCN PAM
ggcaggugcacggauccaca

SEQ ID NO: 22492 - RNA, 20 nt, Artificial Sequence
  HTT spacer sequence GTCN PAM
cugagccaucuggggaggcu

SEQ ID NO: 22493 - RNA, 20 nt, Artificial Sequence
  HTT spacer sequence GTCN PAM
gggccugagccucaucucca

SEQ ID NO: 22494 - RNA, 20 nt, Artificial Sequence
  HTT spacer sequence GTCN PAM
cugucuugcgcuuuccagag

SEQ ID NO: 22495 - RNA, 20 nt, Artificial Sequence
  HTT spacer sequence GTCN PAM
ugcgcuuuccagagagagac

SEQ ID NO: 22496 - RNA, 20 nt, Artificial Sequence
  HTT spacer sequence GTCN PAM
cucucuggaaagcgcaagac

SEQ ID NO: 22497 - RNA, 20 nt, Artificial Sequence
  HTT spacer sequence GTCN PAM
gucucucucuggaaagcgca

SEQ ID NO: 22498 - RNA, 20 nt, Artificial Sequence
  HTT spacer sequence GTCN PAM
agccauggcuugaacaccuc

SEQ ID NO: 22499 - RNA, 20 nt, Artificial Sequence
  HTT spacer sequence GTCN PAM
ggcuuuguucuuguugggag

SEQ ID NO: 22500 - RNA, 20 nt, Artificial Sequence
  HTT spacer sequence GTCN PAM
uugucaccuuccucaccucc

SEQ ID NO: 22501 - RNA, 20 nt, Artificial Sequence
  HTT spacer sequence GTCN PAM
ccuuccucaccuccccaguc

SEQ ID NO: 22502 - RNA, 20 nt, Artificial Sequence
  HTT spacer sequence GTCN PAM
uagucugguuaauccuuaca

SEQ ID NO: 22503 - RNA, 20 nt, Artificial Sequence
  HTT spacer sequence GTCN PAM
gguuaauccuuacaucucac

SEQ ID NO: 22504 - RNA, 20 nt, Artificial Sequence
  HTT spacer sequence GTCN PAM
ccguggcuagaugugaccuc

SEQ ID NO: 22505 - RNA, 20 nt, Artificial Sequence
  HTT spacer sequence GTCN PAM
caucuagccacggugaccgu

SEQ ID NO: 22506 - RNA, 20 nt, Artificial Sequence
  HTT spacer sequence GTCN PAM
cugugaucucaugaggugug

SEQ ID NO: 22507 - RNA, 20 nt, Artificial Sequence
  HTT spacer sequence GTCN PAM
aguucacaccucaugagauc

SEQ ID NO: 22508 - RNA, 20 nt, Artificial Sequence
  HTT spacer sequence GTCN PAM
uuagccggcaucccaggaaa

SEQ ID NO: 22509 - RNA, 20 nt, Artificial Sequence
  HTT spacer sequence GTCN PAM
uccccuggggaaugccucgg

SEQ ID NO: 22510 - RNA, 20 nt, Artificial Sequence
  HTT spacer sequence GTCN PAM
ugcaggccgaggcauucccc

SEQ ID NO: 22511 - RNA, 20 nt, Artificial Sequence
  HTT spacer sequence GTCN PAM
caacaagccuugcaccacga

SEQ ID NO: 22512 - RNA, 20 nt, Artificial Sequence
  HTT spacer sequence GTCN PAM
cucccggguccagcacaccu

SEQ ID NO: 22513 - RNA, 20 nt, Artificial Sequence
  HTT spacer sequence GTCN PAM
agcacaccugagggcugacc

SEQ ID NO: 22514 - RNA, 20 nt, Artificial Sequence
  HTT spacer sequence GTCN PAM
gcccucaggugugcuggacc

SEQ ID NO: 22515 - RNA, 20 nt, Artificial Sequence
  HTT spacer sequence GTCN PAM
ugcguaacuugcacaucuuc

SEQ ID NO: 22516 - RNA, 20 nt, Artificial Sequence
  HTT spacer sequence GTCN PAM
gaaucagaagaugugcaagu

SEQ ID NO: 22517 - RNA, 20 nt, Artificial Sequence
  HTT spacer sequence GTCN PAM
gcacagacgcaacccagucu

SEQ ID NO: 22518 - RNA, 20 nt, Artificial Sequence
  HTT spacer sequence GTCN PAM
gugccgaccugggaugcagu

SEQ ID NO: 22519 - RNA, 20 nt, Artificial Sequence
  HTT spacer sequence GTCN PAM
ccucccaccuccgagagugc

SEQ ID NO: 22520 - RNA, 20 nt, Artificial Sequence
  HTT spacer sequence GTCN PAM
ugaauggagaaccccagcac

SEQ ID NO: 22521 - RNA, 20 nt, Artificial Sequence
  HTT spacer sequence GTCN PAM
uucaguggaugcuucugggu

SEQ ID NO: 22522 - RNA, 20 nt, Artificial Sequence
  HTT spacer sequence GTCN PAM
uacuuacguccuucagugga

SEQ ID NO: 22523 - RNA, 20 nt, Artificial Sequence
  HTT spacer sequence GTCN PAM
cucugcuggaacagccacag

SEQ ID NO: 22524 - RNA, 20 nt, Artificial Sequence
  HTT spacer sequence GTCN PAM
gugguugacagaaauuacac

SEQ ID NO: 22525 - RNA, 20 nt, Artificial Sequence
  HTT spacer sequence GTCN PAM
accacggacguuugccuuca

SEQ ID NO: 22526 - RNA, 20 nt, Artificial Sequence
  HTT spacer sequence GTCN PAM
ccaugaggcuuguccagacg

SEQ ID NO: 22527 - RNA, 20 nt, Artificial Sequence
  HTT spacer sequence GTCN PAM
agacgcagugaaccagucgc

SEQ ID NO: 22528 - RNA, 20 nt, Artificial Sequence
  HTT spacer sequence GTCN PAM
ggacaagccucauggggacu

SEQ ID NO: 22529 - RNA, 20 nt, Artificial Sequence
  HTT spacer sequence GTCN PAM
cagcugauaacacacagacc

SEQ ID NO: 22530 - RNA, 20 nt, Artificial Sequence
  HTT spacer sequence GTCN PAM
guguguuaucagcugcgacu

SEQ ID NO: 22531 - RNA, 20 nt, Artificial Sequence
  HTT spacer sequence GTCN PAM
ccugaugaaauagaaugaau

SEQ ID NO: 22532 - RNA, 20 nt, Artificial Sequence
  HTT spacer sequence GTCN PAM
ggaauucgagaccagccuga

SEQ ID NO: 22533 - RNA, 20 nt, Artificial Sequence
  HTT spacer sequence GTCN PAM
guccccaccucucagccaga

SEQ ID NO: 22534 - RNA, 20 nt, Artificial Sequence
  HTT spacer sequence GTCN PAM
ccaccucucagccagagccu

SEQ ID NO: 22535 - RNA, 20 nt, Artificial Sequence
  HTT spacer sequence GTCN PAM
ucugcucaacugcagaacug

SEQ ID NO: 22536 - RNA, 20 nt, Artificial Sequence
  HTT spacer sequence GTCN PAM
gccaguucugcaguugagca

SEQ ID NO: 22537 - RNA, 20 nt, Artificial Sequence
  HTT spacer sequence GTCN PAM
gcucccacugagcccacagc

SEQ ID NO: 22538 - RNA, 20 nt, Artificial Sequence
  HTT spacer sequence GTCN PAM
aagugugggugcuggcagca

SEQ ID NO: 22539 - RNA, 20 nt, Artificial Sequence
  HTT spacer sequence GTCN PAM
cacugaagcuuuucacaccc

SEQ ID NO: 22540 - RNA, 20 nt, Artificial Sequence
  HTT spacer sequence GTCN PAM
gcggccggcagagcugcuuc

SEQ ID NO: 22541 - RNA, 20 nt, Artificial Sequence
  HTT spacer sequence GTCN PAM
gugugcucugacacagcucc

SEQ ID NO: 22542 - RNA, 20 nt, Artificial Sequence
  HTT spacer sequence GTCN PAM
gagcacacugaccgaaaugg

SEQ ID NO: 22543 - RNA, 20 nt, Artificial Sequence
  HTT spacer sequence GTCN PAM
gggauuucguguuuuucagg

SEQ ID NO: 22544 - RNA, 20 nt, Artificial Sequence
  HTT spacer sequence GTCN PAM
ucgcagagucggggauuucg

SEQ ID NO: 22545 - RNA, 20 nt, Artificial Sequence
  HTT spacer sequence GTCN PAM
aggcagcgugaggacagugc

SEQ ID NO: 22546 - RNA, 20 nt, Artificial Sequence
  HTT spacer sequence GTCN PAM
ucacgcugccuugacaccac

SEQ ID NO: 22547 - RNA, 20 nt, Artificial Sequence
  HTT spacer sequence GTCN PAM
uggcacagccggaacgaagu

SEQ ID NO: 22548 - RNA, 20 nt, Artificial Sequence
  HTT spacer sequence GTCN PAM
ucuugaagagggagggccgu

SEQ ID NO: 22549 - RNA, 20 nt, Artificial Sequence
  HTT spacer sequence GTCN PAM
ccuccuuucagagagugcuc

SEQ ID NO: 22550 - RNA, 20 nt, Artificial Sequence
  HTT spacer sequence GTCN PAM
ccauagccugugcuccucac

SEQ ID NO: 22551 - RNA, 20 nt, Artificial Sequence
  HTT spacer sequence GTCN PAM
acagaaccccucuuucccag

SEQ ID NO: 22552 - RNA, 20 nt, Artificial Sequence
  HTT spacer sequence GTCN PAM
gggaaagagggguucuguug

SEQ ID NO: 22553 - RNA, 20 nt, Artificial Sequence
  HTT spacer sequence GTCN PAM
acaccaucuuugcaaaauca

SEQ ID NO: 22554 - RNA, 20 nt, Artificial Sequence
  HTT spacer sequence GTCN PAM
uuugaugcugcagcuguaag

SEQ ID NO: 22555 - RNA, 20 nt, Artificial Sequence
  HTT spacer sequence GTCN PAM
gucauuugaugcugcagcug

SEQ ID NO: 22556 - RNA, 20 nt, Artificial Sequence
  HTT spacer sequence GTCN PAM
gccaggugauccgugaggag

SEQ ID NO: 22557 - RNA, 20 nt, Artificial Sequence
  HTT spacer sequence GTCN PAM
cugccauccuuccacgccau

SEQ ID NO: 22558 - RNA, 20 nt, Artificial Sequence
  HTT spacer sequence GTCN PAM
ugccuggcugugggccuggc

SEQ ID NO: 22559 - RNA, 20 nt, Artificial Sequence
  HTT spacer sequence GTCN PAM
gugagggcaggaggcaagag

SEQ ID NO: 22560 - RNA, 20 nt, Artificial Sequence
  HTT spacer sequence GTCN PAM
aacuuguucuguuugucacu

SEQ ID NO: 22561 - RNA, 20 nt, Artificial Sequence
  HTT spacer sequence GTCN PAM
ccucacauaccggaugugau

SEQ ID NO: 22562 - RNA, 20 nt, Artificial Sequence
  HTT spacer sequence GTCN PAM
aaguuggggcccucagucua

SEQ ID NO: 22563 - RNA, 20 nt, Artificial Sequence
  HTT spacer sequence GTCN PAM
acucgcccagcggagggaga

SEQ ID NO: 22564 - RNA, 20 nt, Artificial Sequence
  HTT spacer sequence GTCN PAM
gcuagagaggauguggccac

SEQ ID NO: 22565 - RNA, 20 nt, Artificial Sequence
  HTT spacer sequence GTCN PAM
cacuuggaauucagguucca

SEQ ID NO: 22566 - RNA, 20 nt, Artificial Sequence
  HTT spacer sequence GTCN PAM
ugucgcacuuggaauucagg

SEQ ID NO: 22567 - RNA, 20 nt, Artificial Sequence
  HTT spacer sequence GTCN PAM
cagagguuuauaccugagcu

SEQ ID NO: 22568 - RNA, 20 nt, Artificial Sequence
  HTT spacer sequence GTCN PAM
uggagggacaggauggggca

SEQ ID NO: 22569 - RNA, 20 nt, Artificial Sequence
  HTT spacer sequence GTCN PAM
cuccaggacguggugaaggg

SEQ ID NO: 22570 - RNA, 20 nt, Artificial Sequence
  HTT spacer sequence GTCN PAM
ugggacgaugucaugccaug

SEQ ID NO: 22571 - RNA, 20 nt, Artificial Sequence
  HTT spacer sequence GTCN PAM
caggacaguaaccccccaua

SEQ ID NO: 22572 - RNA, 20 nt, Artificial Sequence
  HTT spacer sequence GTCN PAM
gccugcugcaccacgggugg

SEQ ID NO: 22573 - RNA, 20 nt, Artificial Sequence
  HTT spacer sequence GTCN PAM
gcugcucaccaaggugcguu

SEQ ID NO: 22574 - RNA, 20 nt, Artificial Sequence
  HTT spacer sequence GTCN PAM
ccacugggugccagaagucg

SEQ ID NO: 22575 - RNA, 20 nt, Artificial Sequence
  HTT spacer sequence GTCN PAM
gaaguuggaaauagcagccc

SEQ ID NO: 22576 - RNA, 20 nt, Artificial Sequence
  HTT spacer sequence GTCN PAM
aggcacugccccugccacag

SEQ ID NO: 22577 - RNA, 20 nt, Artificial Sequence
  HTT spacer sequence GTCN PAM
caaucauuucuuccaucuca

SEQ ID NO: 22578 - RNA, 20 nt, Artificial Sequence
  HTT spacer sequence GTCN PAM
cuugcagauucaggaaacau

SEQ ID NO: 22579 - RNA, 20 nt, Artificial Sequence
  HTT spacer sequence GTCN PAM
ggagagaaugacuuuagaua

SEQ ID NO: 22580 - RNA, 20 nt, Artificial Sequence
  HTT spacer sequence GTCN PAM
uucucuccugacuuuacauu

SEQ ID NO: 22581 - RNA, 20 nt, Artificial Sequence
  HTT spacer sequence GTCN PAM
ucugggaugugggguuaagc

SEQ ID NO: 22582 - RNA, 20 nt, Artificial Sequence
  HTT spacer sequence GTCN PAM
uugauaaguugguuguguaa

SEQ ID NO: 22583 - RNA, 20 nt, Artificial Sequence
  HTT spacer sequence GTCN PAM
ggugggucaucuguagccaa

SEQ ID NO: 22584 - RNA, 20 nt, Artificial Sequence
  HTT spacer sequence GTCN PAM
ucuguagccaaaucgccaac

SEQ ID NO: 22585 - RNA, 20 nt, Artificial Sequence
  HTT spacer sequence GTCN PAM
cgcagaaggaaacaaagcaa

SEQ ID NO: 22586 - RNA, 20 nt, Artificial Sequence
  HTT spacer sequence GTCN PAM
cgcucuguugcccaggcugg

SEQ ID NO: 22587 - RNA, 20 nt, Artificial Sequence
  HTT spacer sequence GTCN PAM
cugguagcuuuuccagcucu

SEQ ID NO: 22588 - RNA, 20 nt, Artificial Sequence
  HTT spacer sequence GTCN PAM
aaguggcuaucugggcuguc

SEQ ID NO: 22589 - RNA, 20 nt, Artificial Sequence
  HTT spacer sequence GTCN PAM
cucuccucuguguccucccc

SEQ ID NO: 22590 - RNA, 20 nt, Artificial Sequence
  HTT spacer sequence GTCN PAM
uccccgccugaacugucacc

SEQ ID NO: 22591 - RNA, 20 nt, Artificial Sequence
  HTT spacer sequence GTCN PAM
ccuucuuccucguugcucuc

SEQ ID NO: 22592 - RNA, 20 nt, Artificial Sequence
  HTT spacer sequence GTCN PAM
cuggcuuccuugcuuugcuc

SEQ ID NO: 22593 - RNA, 20 nt, Artificial Sequence
  HTT spacer sequence GTCN PAM
aggaagagcaaagcaaggaa

SEQ ID NO: 22594 - RNA, 20 nt, Artificial Sequence
  HTT spacer sequence GTCN PAM
aggaagauguccaggaagag

SEQ ID NO: 22595 - RNA, 20 nt, Artificial Sequence
  HTT spacer sequence GTCN PAM
ucaugcccugugguuuccac

SEQ ID NO: 22596 - RNA, 20 nt, Artificial Sequence
  HTT spacer sequence GTCN PAM
ucuuuaucuagcacgaagcc

SEQ ID NO: 22597 - RNA, 20 nt, Artificial Sequence
  HTT spacer sequence GTCN PAM
gcagaugaucugaaugaugg

SEQ ID NO: 22598 - RNA, 20 nt, Artificial Sequence
  HTT spacer sequence GTCN PAM
cucagccugagcaggaagga

SEQ ID NO: 22599 - RNA, 20 nt, Artificial Sequence
  HTT spacer sequence GTCN PAM
uagagcacacucuuccaaca

SEQ ID NO: 22600 - RNA, 20 nt, Artificial Sequence
  HTT spacer sequence GTCN PAM
ucauccuguuagagggcugc

SEQ ID NO: 22601 - RNA, 20 nt, Artificial Sequence
  HTT spacer sequence GTCN PAM
uaugcaucgggcuaagguag

SEQ ID NO: 22602 - RNA, 20 nt, Artificial Sequence
  HTT spacer sequence GTCN PAM
cuguucucugacuugggagu

SEQ ID NO: 22603 - RNA, 20 nt, Artificial Sequence
  HTT spacer sequence GTCN PAM
gagaacagagacaaaaagga

SEQ ID NO: 22604 - RNA, 20 nt, Artificial Sequence
  HTT spacer sequence GTCN PAM
cacaaaacucccaagucaga

SEQ ID NO: 22605 - RNA, 20 nt, Artificial Sequence
  HTT spacer sequence GTCN PAM
gaauuucuuuccagucuugg

SEQ ID NO: 22606 - RNA, 20 nt, Artificial Sequence
  HTT spacer sequence GTCN PAM
uggucuagcuucuccgugag

SEQ ID NO: 22607 - RNA, 20 nt, Artificial Sequence
  HTT spacer sequence GTCN PAM
agcuucuccgugagcucgag

SEQ ID NO: 22608 - RNA, 20 nt, Artificial Sequence
  HTT spacer sequence GTCN PAM
cucccucuggggaaaaaaua

SEQ ID NO: 22609 - RNA, 20 nt, Artificial Sequence
  HTT spacer sequence GTCN PAM
guuauuuuuuccccagaggg

SEQ ID NO: 22610 - RNA, 20 nt, Artificial Sequence
  HTT spacer sequence GTCN PAM
aaacaagagaagguggguua

SEQ ID NO: 22611 - RNA, 20 nt, Artificial Sequence
  HTT spacer sequence GTCN PAM
cggaaagagcugauugaaga

SEQ ID NO: 22612 - RNA, 20 nt, Artificial Sequence
  HTT spacer sequence GTCN PAM
ucuugugaaggagcccaccg

SEQ ID NO: 22613 - RNA, 20 nt, Artificial Sequence
  HTT spacer sequence GTCN PAM
gcucagcugggggcaaaagg

SEQ ID NO: 22614 - RNA, 20 nt, Artificial Sequence
  HTT spacer sequence GTCN PAM
ccaggcccugcccagggagg

SEQ ID NO: 22615 - RNA, 20 nt, Artificial Sequence
  HTT spacer sequence GTCN PAM
ccuguaccacggcgcccccu

SEQ ID NO: 22616 - RNA, 20 nt, Artificial Sequence
  HTT spacer sequence GTCN PAM
ccugcacgccacggcgcccc

SEQ ID NO: 22617 - RNA, 20 nt, Artificial Sequence
  HTT spacer sequence GTCN PAM
guuuuagauuuguacaccuu

SEQ ID NO: 22618 - RNA, 20 nt, Artificial Sequence
  HTT spacer sequence GTCN PAM
cauuuccagcaucuucagaa

SEQ ID NO: 22619 - RNA, 20 nt, Artificial Sequence
  HTT spacer sequence GTCN PAM
gagcuguggggagaacccac

SEQ ID NO: 22620 - RNA, 20 nt, Artificial Sequence
  HTT spacer sequence GTCN PAM
ggugaggcuggggugcugug

SEQ ID NO: 22621 - RNA, 20 nt, Artificial Sequence
  HTT spacer sequence GTCN PAM
cuguccacaaugucauuaug

SEQ ID NO: 22622 - RNA, 20 nt, Artificial Sequence
  HTT spacer sequence GTCN PAM
acaaugucauuaugcuucuc

SEQ ID NO: 22623 - RNA, 20 nt, Artificial Sequence
  HTT spacer sequence GTCN PAM
uuaugcuucucgaugucugc

SEQ ID NO: 22624 - RNA, 20 nt, Artificial Sequence
  HTT spacer sequence GTCN PAM
gccaaagacuggccauaaug

SEQ ID NO: 22625 - RNA, 20 nt, Artificial Sequence
  HTT spacer sequence GTCN PAM
uuggcagacaucgagaagca

SEQ ID NO: 22626 - RNA, 20 nt, Artificial Sequence
  HTT spacer sequence GTCN PAM
auucuucaucuucauuuaga

SEQ ID NO: 22627 - RNA, 20 nt, Artificial Sequence
  HTT spacer sequence GTCN PAM
cugacagaagagaaaaaaag

SEQ ID NO: 22628 - RNA, 20 nt, Artificial Sequence
  HTT spacer sequence GTCN PAM
gcgacaucaugagaaaaaaa

SEQ ID NO: 22629 - RNA, 20 nt, Artificial Sequence
  HTT spacer sequence GTCN PAM
guguacgcuggaaaacaggu

SEQ ID NO: 22630 - RNA, 20 nt, Artificial Sequence
  HTT spacer sequence GTCN PAM
gaaacaaucucacaaaaaau

SEQ ID NO: 22631 - RNA, 20 nt, Artificial Sequence
  HTT spacer sequence GTCN PAM
uggagguugaauucccuaaa

SEQ ID NO: 22632 - RNA, 20 nt, Artificial Sequence
  HTT spacer sequence GTCN PAM
ucucacagcuuucuuuaggg

SEQ ID NO: 22633 - RNA, 20 nt, Artificial Sequence
  HTT spacer sequence GTCN PAM
agcuggcaaucagaugggag

SEQ ID NO: 22634 - RNA, 20 nt, Artificial Sequence
  HTT spacer sequence GTCN PAM
guacagaguucaucgagcag

SEQ ID NO: 22635 - RNA, 20 nt, Artificial Sequence
  HTT spacer sequence GTCN PAM
cuggcuucuagcaggaaggg

SEQ ID NO: 22636 - RNA, 20 nt, Artificial Sequence
  HTT spacer sequence GTCN PAM
caacaucuauauaguuuaag

SEQ ID NO: 22637 - RNA, 20 nt, Artificial Sequence
  HTT spacer sequence GTCN PAM
cuuacaguuggucaggccuu

SEQ ID NO: 22638 - RNA, 20 nt, Artificial Sequence
  HTT spacer sequence GTCN PAM
cgcgcacgggcccucaggaa

SEQ ID NO: 22639 - RNA, 20 nt, Artificial Sequence
  HTT spacer sequence GTCN PAM
cacgucguggcgcgucuucc

SEQ ID NO: 22640 - RNA, 20 nt, Artificial Sequence
  HTT spacer sequence GTCN PAM
uggcgcgucuuccggcccag

SEQ ID NO: 22641 - RNA, 20 nt, Artificial Sequence
  HTT spacer sequence GTCN PAM
uccggcccaggaucuggaac

SEQ ID NO: 22642 - RNA, 20 nt, Artificial Sequence
  HTT spacer sequence GTCN PAM
gggcgcgaaggaaggccucc

SEQ ID NO: 22643 - RNA, 20 nt, Artificial Sequence
  HTT spacer sequence GTCN PAM
cgggcccuugggcgcagcgg

SEQ ID NO: 22644 - RNA, 20 nt, Artificial Sequence
  HTT spacer sequence GTCN PAM
uaggguagcgcgcgccuguc

SEQ ID NO: 22645 - RNA, 20 nt, Artificial Sequence
  HTT spacer sequence GTCN PAM
cgcgagaacagcgcagcacc

SEQ ID NO: 22646 - RNA, 20 nt, Artificial Sequence
  HTT spacer sequence GTCN PAM
gaggugcugcgcuguucucg

SEQ ID NO: 22647 - RNA, 20 nt, Artificial Sequence
  HTT spacer sequence GTCN PAM
cugagccuaucggcgaguaa

SEQ ID NO: 22648 - RNA, 20 nt, Artificial Sequence
  HTT spacer sequence GTCN PAM
ccggccgcggcgggcgcccc

SEQ ID NO: 22649 - RNA, 20 nt, Artificial Sequence
  HTT spacer sequence GTCN PAM
ccgcugccgcgcuaucgccc

SEQ ID NO: 22650 - RNA, 20 nt, Artificial Sequence
  HTT spacer sequence GTCN PAM
cagcugucaccgcugccgcg

SEQ ID NO: 22651 - RNA, 20 nt, Artificial Sequence
  HTT spacer sequence GTCN PAM
ggcugcccccuccccucgcc

SEQ ID NO: 22652 - RNA, 20 nt, Artificial Sequence
  HTT spacer sequence GTCN PAM
ccucggucucgcagaauccg

SEQ ID NO: 22653 - RNA, 20 nt, Artificial Sequence
  HTT spacer sequence GTCN PAM
cgcagaauccgccggcggcg

SEQ ID NO: 22654 - RNA, 20 nt, Artificial Sequence
  HTT spacer sequence GTCN PAM
uggcgccgccgccgccggcg

SEQ ID NO: 22655 - RNA, 20 nt, Artificial Sequence
  HTT spacer sequence GTCN PAM
aggugggugcgcggcaggcg

SEQ ID NO: 22656 - RNA, 20 nt, Artificial Sequence
  HTT spacer sequence GTCN PAM
ggggcgccugccgcgcaccc

SEQ ID NO: 22657 - RNA, 20 nt, Artificial Sequence
  HTT spacer sequence GTCN PAM
cggaccucaugucucccuug

SEQ ID NO: 22658 - RNA, 20 nt, Artificial Sequence
  HTT spacer sequence GTCN PAM
gagacagaggauugcacaga

SEQ ID NO: 22659 - RNA, 20 nt, Artificial Sequence
  HTT spacer sequence GTCN PAM
cccuugccugcgucucaaga

SEQ ID NO: 22660 - RNA, 20 nt, Artificial Sequence
  HTT spacer sequence GTCN PAM
caagagagcuggcgacagag

SEQ ID NO: 22661 - RNA, 20 nt, Artificial Sequence
  HTT spacer sequence GTCN PAM
ccagcucucuugagacgcag

SEQ ID NO: 22662 - RNA, 20 nt, Artificial Sequence
  HTT spacer sequence GTCN PAM
gaggcucugucgccagcucu

SEQ ID NO: 22663 - RNA, 20 nt, Artificial Sequence
  HTT spacer sequence GTCN PAM
cugugcuagccacgguaguu

SEQ ID NO: 22664 - RNA, 20 nt, Artificial Sequence
  HTT spacer sequence GTCN PAM
cacuauguugcccaggcuag

SEQ ID NO: 22665 - RNA, 20 nt, Artificial Sequence
  HTT spacer sequence GTCN PAM
ggaaccccuggacucaagug

SEQ ID NO: 22666 - RNA, 20 nt, Artificial Sequence
  HTT spacer sequence GTCN PAM
agggguuccagacuagccug

SEQ ID NO: 22667 - RNA, 20 nt, Artificial Sequence
  HTT spacer sequence GTCN PAM
gauauuugaaguaaucuaug

SEQ ID NO: 22668 - RNA, 20 nt, Artificial Sequence
  HTT spacer sequence GTCN PAM
gccaaauuauuucucugcca

SEQ ID NO: 22669 - RNA, 20 nt, Artificial Sequence
  HTT spacer sequence GTCN PAM
accgucuguuacuaucauua

SEQ ID NO: 22670 - RNA, 20 nt, Artificial Sequence
  HTT spacer sequence GTCN PAM
aaauauaaagcucaagaaca

SEQ ID NO: 22671 - RNA, 20 nt, Artificial Sequence
  HTT spacer sequence GTCN PAM
aaaucauuuuggcuuuauua

SEQ ID NO: 22672 - RNA, 20 nt, Artificial Sequence
  HTT spacer sequence GTCN PAM
uggucauaaagacuaauuug

SEQ ID NO: 22673 - RNA, 20 nt, Artificial Sequence
  HTT spacer sequence GTCN PAM
uaaagacuaauuugguaaca

SEQ ID NO: 22674 - RNA, 20 nt, Artificial Sequence
  HTT spacer sequence GTCN PAM
uuaugaccaugacauaaaug

SEQ ID NO: 22675 - RNA, 20 nt, Artificial Sequence
  HTT spacer sequence GTCN PAM
ccaguaaauaugugguuaau

SEQ ID NO: 22676 - RNA, 20 nt, Artificial Sequence
  HTT spacer sequence GTCN PAM
cauauuacauuuuugugcuu

SEQ ID NO: 22677 - RNA, 20 nt, Artificial Sequence
  HTT spacer sequence GTCN PAM
aauuuuccauuuuuauaagg

SEQ ID NO: 22678 - RNA, 20 nt, Artificial Sequence
  HTT spacer sequence GTCN PAM
uuagggugggcccuaaucca

SEQ ID NO: 22679 - RNA, 20 nt, Artificial Sequence
  HTT spacer sequence GTCN PAM
cuauaaauacccuaucucca

SEQ ID NO: 22680 - RNA, 20 nt, Artificial Sequence
  HTT spacer sequence GTCN PAM
gaggguuaggggcuaacugg

SEQ ID NO: 22681 - RNA, 20 nt, Artificial Sequence
  HTT spacer sequence GTCN PAM
ggcuggcuccaaagcccaug

SEQ ID NO: 22682 - RNA, 20 nt, Artificial Sequence
  HTT spacer sequence GTCN PAM
guuacuucaguuucacucaa

SEQ ID NO: 22683 - RNA, 20 nt, Artificial Sequence
  HTT spacer sequence GTCN PAM
uuucagaguuacuucccuug

SEQ ID NO: 22684 - RNA, 20 nt, Artificial Sequence
  HTT spacer sequence GTCN PAM
gcuuuuuguucucugugucu

SEQ ID NO: 22685 - RNA, 20 nt, Artificial Sequence
  HTT spacer sequence GTCN PAM
gcuugcuucagcccuuuucu

SEQ ID NO: 22686 - RNA, 20 nt, Artificial Sequence
  HTT spacer sequence GTCN PAM
guugcuguauuaaucuaucc

SEQ ID NO: 22687 - RNA, 20 nt, Artificial Sequence
  HTT spacer sequence GTCN PAM
gccaaauaaaagcuuccucu

SEQ ID NO: 22688 - RNA, 20 nt, Artificial Sequence
  HTT spacer sequence GTCN PAM
cagcugcugaggaggcugag

SEQ ID NO: 22689 - RNA, 20 nt, Artificial Sequence
  HTT spacer sequence GTCN PAM
aggaagucaaggcugcagug

SEQ ID NO: 22690 - RNA, 20 nt, Artificial Sequence
  HTT spacer sequence GTCN PAM
aggcugcagugagacuugca

SEQ ID NO: 22691 - RNA, 20 nt, Artificial Sequence
  HTT spacer sequence GTCN PAM
cacugcagccuugacuuccu

SEQ ID NO: 22692 - RNA, 20 nt, Artificial Sequence
  HTT spacer sequence GTCN PAM
cccaggcuagaaugcagaau

SEQ ID NO: 22693 - RNA, 20 nt, Artificial Sequence
  HTT spacer sequence GTCN PAM
ugcucugucacccaggcuag

SEQ ID NO: 22694 - RNA, 20 nt, Artificial Sequence
  HTT spacer sequence GTCN PAM
uucacuacugguccagaucc

SEQ ID NO: 22695 - RNA, 20 nt, Artificial Sequence
  HTT spacer sequence GTCN PAM
agaucccaugccugccaagg

SEQ ID NO: 22696 - RNA, 20 nt, Artificial Sequence
  HTT spacer sequence GTCN PAM
guguaccucauucuuccugg

SEQ ID NO: 22697 - RNA, 20 nt, Artificial Sequence
  HTT spacer sequence GTCN PAM
cucaauaaagcaccucuucu

SEQ ID NO: 22698 - RNA, 20 nt, Artificial Sequence
  HTT spacer sequence GTCN PAM
ccugagagcuguacugucac

SEQ ID NO: 22699 - RNA, 20 nt, Artificial Sequence
  HTT spacer sequence GTCN PAM
gugcagcccucagaggagag

SEQ ID NO: 22700 - RNA, 20 nt, Artificial Sequence
  HTT spacer sequence GTCN PAM
ggcuucagucuaucccuggc

SEQ ID NO: 22701 - RNA, 20 nt, Artificial Sequence
  HTT spacer sequence GTCN PAM
aucccuggcuugaaggugag

SEQ ID NO: 22702 - RNA, 20 nt, Artificial Sequence
  HTT spacer sequence GTCN PAM
ccagugaaaccucaccuuca

SEQ ID NO: 22703 - RNA, 20 nt, Artificial Sequence
  HTT spacer sequence GTCN PAM
gccuccugcccuuguucaug

SEQ ID NO: 22704 - RNA, 20 nt, Artificial Sequence
  HTT spacer sequence GTCN PAM
aaagucuggagggggcugag

SEQ ID NO: 22705 - RNA, 20 nt, Artificial Sequence
  HTT spacer sequence GTCN PAM
ggagggggcugagguggcag

SEQ ID NO: 22706 - RNA, 20 nt, Artificial Sequence
  HTT spacer sequence GTCN PAM
uauucauauuucacuaucuc

SEQ ID NO: 22707 - RNA, 20 nt, Artificial Sequence
  HTT spacer sequence GTCN PAM
cucuuggucuuauucauauu

SEQ ID NO: 22708 - RNA, 20 nt, Artificial Sequence
  HTT spacer sequence GTCN PAM
cagggcacuuguagaucaug

SEQ ID NO: 22709 - RNA, 20 nt, Artificial Sequence
  HTT spacer sequence GTCN PAM
cuugccugaugcaguauuuu

SEQ ID NO: 22710 - RNA, 20 nt, Artificial Sequence
  HTT spacer sequence GTCN PAM
agggugaacauguugaaugc

SEQ ID NO: 22711 - RNA, 20 nt, Artificial Sequence
  HTT spacer sequence GTCN PAM
agagcaccuggcauucaaca

SEQ ID NO: 22712 - RNA, 20 nt, Artificial Sequence
  HTT spacer sequence GTCN PAM
cacaccacaagauguccaga

SEQ ID NO: 22713 - RNA, 20 nt, Artificial Sequence
  HTT spacer sequence GTCN PAM
agagcucaugaucucaguug

SEQ ID NO: 22714 - RNA, 20 nt, Artificial Sequence
  HTT spacer sequence GTCN PAM
uguuagaucuuguuuacaga

SEQ ID NO: 22715 - RNA, 20 nt, Artificial Sequence
  HTT spacer sequence GTCN PAM
uaguaaaaaauggaaggaga

SEQ ID NO: 22716 - RNA, 20 nt, Artificial Sequence
  HTT spacer sequence GTCN PAM
guaucuccuuccauuuuuua

SEQ ID NO: 22717 - RNA, 20 nt, Artificial Sequence
  HTT spacer sequence GTCN PAM
gccagugcagugagcuuaga

SEQ ID NO: 22718 - RNA, 20 nt, Artificial Sequence
  HTT spacer sequence GTCN PAM
aagcucacugcacuggcuga

SEQ ID NO: 22719 - RNA, 20 nt, Artificial Sequence
  HTT spacer sequence GTCN PAM
acagccaacuuuauaacugc

SEQ ID NO: 22720 - RNA, 20 nt, Artificial Sequence
  HTT spacer sequence GTCN PAM
caccauguugcccaggcugg

SEQ ID NO: 22721 - RNA, 20 nt, Artificial Sequence
  HTT spacer sequence GTCN PAM
uggggagaggaauuuuuacu

SEQ ID NO: 22722 - RNA, 20 nt, Artificial Sequence
  HTT spacer sequence GTCN PAM
guagaagaaacacuguuaag

SEQ ID NO: 22723 - RNA, 20 nt, Artificial Sequence
  HTT spacer sequence GTCN PAM
ggaaggcuacuaaacaauac

SEQ ID NO: 22724 - RNA, 20 nt, Artificial Sequence
  HTT spacer sequence GTCN PAM
guuccaaucuuuuauccguu

SEQ ID NO: 22725 - RNA, 20 nt, Artificial Sequence
  HTT spacer sequence GTCN PAM
uuuuguuguugagguauaag

SEQ ID NO: 22726 - RNA, 20 nt, Artificial Sequence
  HTT spacer sequence GTCN PAM
accacaugcuguucuaagcc

SEQ ID NO: 22727 - RNA, 20 nt, Artificial Sequence
  HTT spacer sequence GTCN PAM
uugugacaagcaaccgauag

SEQ ID NO: 22728 - RNA, 20 nt, Artificial Sequence
  HTT spacer sequence GTCN PAM
caaagacugcuauaauccuu

SEQ ID NO: 22729 - RNA, 20 nt, Artificial Sequence
  HTT spacer sequence GTCN PAM
uccuaucgguugcuugucac

SEQ ID NO: 22730 - RNA, 20 nt, Artificial Sequence
  HTT spacer sequence GTCN PAM
cuucaggcaguucugugaua

SEQ ID NO: 22731 - RNA, 20 nt, Artificial Sequence
  HTT spacer sequence GTCN PAM
ggagaucgagaccauccuga

SEQ ID NO: 22732 - RNA, 20 nt, Artificial Sequence
  HTT spacer sequence GTCN PAM
cgaucuccugaccucaugau

SEQ ID NO: 22733 - RNA, 20 nt, Artificial Sequence
  HTT spacer sequence GTCN PAM
ggauggucucgaucuccuga

SEQ ID NO: 22734 - RNA, 20 nt, Artificial Sequence
  HTT spacer sequence GTCN PAM
cuacuaaaauacaaaaaguu

SEQ ID NO: 22735 - RNA, 20 nt, Artificial Sequence
  HTT spacer sequence GTCN PAM
cagcuacuugggaggcugag

SEQ ID NO: 22736 - RNA, 20 nt, Artificial Sequence
  HTT spacer sequence GTCN PAM
ggauucaaccagagaacuag

SEQ ID NO: 22737 - RNA, 20 nt, Artificial Sequence
  HTT spacer sequence GTCN PAM
ucaggcagaauuucuuccuc

SEQ ID NO: 22738 - RNA, 20 nt, Artificial Sequence
  HTT spacer sequence GTCN PAM
uccuggaggaagaaauucug

SEQ ID NO: 22739 - RNA, 20 nt, Artificial Sequence
  HTT spacer sequence GTCN PAM
ucaucaucggcaacuucaua

SEQ ID NO: 22740 - RNA, 20 nt, Artificial Sequence
  HTT spacer sequence GTCN PAM
acaaucacuucgguccucau

SEQ ID NO: 22741 - RNA, 20 nt, Artificial Sequence
  HTT spacer sequence GTCN PAM
aucuuagauagauucuucaa

SEQ ID NO: 22742 - RNA, 20 nt, Artificial Sequence
  HTT spacer sequence GTCN PAM
ggcaucacacccagccaaau

SEQ ID NO: 22743 - RNA, 20 nt, Artificial Sequence
  HTT spacer sequence GTCN PAM
cacuauguuggccaugcuga

SEQ ID NO: 22744 - RNA, 20 nt, Artificial Sequence
  HTT spacer sequence GTCN PAM
agcuaguuuuuuuguuuauu

SEQ ID NO: 22745 - RNA, 20 nt, Artificial Sequence
  HTT spacer sequence GTCN PAM
ugaggaaacuaacaauuaga

SEQ ID NO: 22746 - RNA, 20 nt, Artificial Sequence
  HTT spacer sequence GTCN PAM
cucuuggacuaaaaauaaca

SEQ ID NO: 22747 - RNA, 20 nt, Artificial Sequence
  HTT spacer sequence GTCN PAM
aagagagacaaauaaaauuc

SEQ ID NO: 22748 - RNA, 20 nt, Artificial Sequence
  HTT spacer sequence GTCN PAM
acaacaccuugaacugggca

SEQ ID NO: 22749 - RNA, 20 nt, Artificial Sequence
  HTT spacer sequence GTCN PAM
cagcuucuucauuuuagguc

SEQ ID NO: 22750 - RNA, 20 nt, Artificial Sequence
  HTT spacer sequence GTCN PAM
aaguaaacucuuuaaauuac

SEQ ID NO: 22751 - RNA, 20 nt, Artificial Sequence
  HTT spacer sequence GTCN PAM
uucacauuuaaguaugaugu

SEQ ID NO: 22752 - RNA, 20 nt, Artificial Sequence
  HTT spacer sequence GTCN PAM
gguaaggcugcaagauacua

SEQ ID NO: 22753 - RNA, 20 nt, Artificial Sequence
  HTT spacer sequence GTCN PAM
cuauacaaaauuuaauugua

SEQ ID NO: 22754 - RNA, 20 nt, Artificial Sequence
  HTT spacer sequence GTCN PAM
uuccauuucuugagaucuuc

SEQ ID NO: 22755 - RNA, 20 nt, Artificial Sequence
  HTT spacer sequence GTCN PAM
ucugauccacgaacaggaga

SEQ ID NO: 22756 - RNA, 20 nt, Artificial Sequence
  HTT spacer sequence GTCN PAM
ugauuacuguagcuuuguac

SEQ ID NO: 22757 - RNA, 20 nt, Artificial Sequence
  HTT spacer sequence GTCN PAM
uggcaugaugguagacauac

SEQ ID NO: 22758 - RNA, 20 nt, Artificial Sequence
  HTT spacer sequence GTCN PAM
accaucaugccaggaccaua

SEQ ID NO: 22759 - RNA, 20 nt, Artificial Sequence
  HTT spacer sequence GTCN PAM
augguauggaaucgagagug

SEQ ID NO: 22760 - RNA, 20 nt, Artificial Sequence
  HTT spacer sequence GTCN PAM
ugauagaaucaaccugcuau

SEQ ID NO: 22761 - RNA, 20 nt, Artificial Sequence
  HTT spacer sequence GTCN PAM
caauuuuucugaaacuaaau

SEQ ID NO: 22762 - RNA, 20 nt, Artificial Sequence
  HTT spacer sequence GTCN PAM
uuacuaaaaaauacaaaaau

SEQ ID NO: 22763 - RNA, 20 nt, Artificial Sequence
  HTT spacer sequence GTCN PAM
ugaacuccugaccucaacug

SEQ ID NO: 22764 - RNA, 20 nt, Artificial Sequence
  HTT spacer sequence GTCN PAM
ggaguucaagaccagccugg

SEQ ID NO: 22765 - RNA, 20 nt, Artificial Sequence
  HTT spacer sequence GTCN PAM
aaaagguuuauccaaguugu

SEQ ID NO: 22766 - RNA, 20 nt, Artificial Sequence
  HTT spacer sequence GTCN PAM
guggaugaauggauaaauaa

SEQ ID NO: 22767 - RNA, 20 nt, Artificial Sequence
  HTT spacer sequence GTCN PAM
caaacagguaucugcacacc

SEQ ID NO: 22768 - RNA, 20 nt, Artificial Sequence
  HTT spacer sequence GTCN PAM
cuacuaaaaauacaaaacua

SEQ ID NO: 22769 - RNA, 20 nt, Artificial Sequence
  HTT spacer sequence GTCN PAM
caaacuccugacuucaggug

SEQ ID NO: 22770 - RNA, 20 nt, Artificial Sequence
  HTT spacer sequence GTCN PAM
ggaguuugagaccagccaac

SEQ ID NO: 22771 - RNA, 20 nt, Artificial Sequence
  HTT spacer sequence GTCN PAM
caacaucuggagguauuucu

SEQ ID NO: 22772 - RNA, 20 nt, Artificial Sequence
  HTT spacer sequence GTCN PAM
caaucuacauucugucacaa

SEQ ID NO: 22773 - RNA, 20 nt, Artificial Sequence
  HTT spacer sequence GTCN PAM
gcaugcauacacaaggcacu

SEQ ID NO: 22774 - RNA, 20 nt, Artificial Sequence
  HTT spacer sequence GTCN PAM
cucaugucacagcggaggaa

SEQ ID NO: 22775 - RNA, 20 nt, Artificial Sequence
  HTT spacer sequence GTCN PAM
cagcggaggaaacggaggcc

SEQ ID NO: 22776 - RNA, 20 nt, Artificial Sequence
  HTT spacer sequence GTCN PAM
cuggcugggugccauggcuc

SEQ ID NO: 22777 - RNA, 20 nt, Artificial Sequence
  HTT spacer sequence GTCN PAM
ugggauauugugauaagaau

SEQ ID NO: 22778 - RNA, 20 nt, Artificial Sequence
  HTT spacer sequence GTCN PAM
ucaucugggaugccacagag

SEQ ID NO: 22779 - RNA, 20 nt, Artificial Sequence
  HTT spacer sequence GTCN PAM
acgcuuuuguccuucacauc

SEQ ID NO: 22780 - RNA, 20 nt, Artificial Sequence
  HTT spacer sequence GTCN PAM
uucacaucccucuccugggc

SEQ ID NO: 22781 - RNA, 20 nt, Artificial Sequence
  HTT spacer sequence GTCN PAM
cucagccagugaguggcuga

SEQ ID NO: 22782 - RNA, 20 nt, Artificial Sequence
  HTT spacer sequence GTCN PAM
gcuguucuguuaucaagcag

SEQ ID NO: 22783 - RNA, 20 nt, Artificial Sequence
  HTT spacer sequence GTCN PAM
cagcuacucaggaggcugag

SEQ ID NO: 22784 - RNA, 20 nt, Artificial Sequence
  HTT spacer sequence GTCN PAM
ugggcuuaagcaauccuuca

SEQ ID NO: 22785 - RNA, 20 nt, Artificial Sequence
  HTT spacer sequence GTCN PAM
auuaaauuagaagaaauggu

SEQ ID NO: 22786 - RNA, 20 nt, Artificial Sequence
  HTT spacer sequence GTCN PAM
ccagggcuggagugcagugg

SEQ ID NO: 22787 - RNA, 20 nt, Artificial Sequence
  HTT spacer sequence GTCN PAM
cacucugucgccagggcugg

SEQ ID NO: 22788 - RNA, 20 nt, Artificial Sequence
  HTT spacer sequence GTCN PAM
agagcuauccugcuagaggg

SEQ ID NO: 22789 - RNA, 20 nt, Artificial Sequence
  HTT spacer sequence GTCN PAM
cugagcacagacacccuuug

SEQ ID NO: 22790 - RNA, 20 nt, Artificial Sequence
  HTT spacer sequence GTCN PAM
gugcucagggacuguggcuc

SEQ ID NO: 22791 - RNA, 20 nt, Artificial Sequence
  HTT spacer sequence GTCN PAM
cgggcauccccuuugagcag

SEQ ID NO: 22792 - RNA, 20 nt, Artificial Sequence
  HTT spacer sequence GTCN PAM
ucgccucauuuauugaacca

SEQ ID NO: 22793 - RNA, 20 nt, Artificial Sequence
  HTT spacer sequence GTCN PAM
cacauugcauuguucuuuua

SEQ ID NO: 22794 - RNA, 20 nt, Artificial Sequence
  HTT spacer sequence GTCN PAM
aaauguguucuuuguuacgg

SEQ ID NO: 22795 - RNA, 20 nt, Artificial Sequence
  HTT spacer sequence GTCN PAM
ugagaacauggcuucaggua

SEQ ID NO: 22796 - RNA, 20 nt, Artificial Sequence
  HTT spacer sequence GTCN PAM
ccaagagaagggauucuuaa

SEQ ID NO: 22797 - RNA, 20 nt, Artificial Sequence
  HTT spacer sequence GTCN PAM
cuuugcccagauggaaagac

SEQ ID NO: 22798 - RNA, 20 nt, Artificial Sequence
  HTT spacer sequence GTCN PAM
uuccaucugggcaaagugac

SEQ ID NO: 22799 - RNA, 20 nt, Artificial Sequence
  HTT spacer sequence GTCN PAM
uaaauguauggaaauagaau

SEQ ID NO: 22800 - RNA, 20 nt, Artificial Sequence
  HTT spacer sequence GTCN PAM
caaauucacauaguacagag

SEQ ID NO: 22801 - RNA, 20 nt, Artificial Sequence
  HTT spacer sequence GTCN PAM
aaacagaguaggguuacgua

SEQ ID NO: 22802 - RNA, 20 nt, Artificial Sequence
  HTT spacer sequence GTCN PAM
auuugggaaaauccuaagga

SEQ ID NO: 22803 - RNA, 20 nt, Artificial Sequence
  HTT spacer sequence GTCN PAM
uuuccuuaggauuuucccaa

SEQ ID NO: 22804 - RNA, 20 nt, Artificial Sequence
  HTT spacer sequence GTCN PAM
gugagucauuuccuuaggau

SEQ ID NO: 22805 - RNA, 20 nt, Artificial Sequence
  HTT spacer sequence GTCN PAM
aggcaacaagagcgaaacuc

SEQ ID NO: 22806 - RNA, 20 nt, Artificial Sequence
  HTT spacer sequence GTCN PAM
ggguggucuugaacucccga

SEQ ID NO: 22807 - RNA, 20 nt, Artificial Sequence
  HTT spacer sequence GTCN PAM
ugaacucccgaccucgggug

SEQ ID NO: 22808 - RNA, 20 nt, Artificial Sequence
  HTT spacer sequence GTCN PAM
ggaguucaagaccacccuga

SEQ ID NO: 22809 - RNA, 20 nt, Artificial Sequence
  HTT spacer sequence GTCN PAM
ccuagauggagaccacugua

SEQ ID NO: 22810 - RNA, 20 nt, Artificial Sequence
  HTT spacer sequence GTCN PAM
ccaucuaggagacccaucau

SEQ ID NO: 22811 - RNA, 20 nt, Artificial Sequence
  HTT spacer sequence GTCN PAM
ggggauuuaaagagauauua

SEQ ID NO: 22812 - RNA, 20 nt, Artificial Sequence
  HTT spacer sequence GTCN PAM
cuaagagccaggcaagccau

SEQ ID NO: 22813 - RNA, 20 nt, Artificial Sequence
  HTT spacer sequence GTCN PAM
cacccgggcaguguaaccug

SEQ ID NO: 22814 - RNA, 20 nt, Artificial Sequence
  HTT spacer sequence GTCN PAM
gcuuucuaauuaacuucaag

SEQ ID NO: 22815 - RNA, 20 nt, Artificial Sequence
  HTT spacer sequence GTCN PAM
agcugcaggugcauaacaga

SEQ ID NO: 22816 - RNA, 20 nt, Artificial Sequence
  HTT spacer sequence GTCN PAM
ugucaagcugcaggugcaua

SEQ ID NO: 22817 - RNA, 20 nt, Artificial Sequence
  HTT spacer sequence GTCN PAM
cucugguacaguuccagaga

SEQ ID NO: 22818 - RNA, 20 nt, Artificial Sequence
  HTT spacer sequence GTCN PAM
cuggaacuguaccagaggga

SEQ ID NO: 22819 - RNA, 20 nt, Artificial Sequence
  HTT spacer sequence GTCN PAM
uagaacaggaaagucauuuu

SEQ ID NO: 22820 - RNA, 20 nt, Artificial Sequence
  HTT spacer sequence GTCN PAM
uuuucuuacuuggacucuug

SEQ ID NO: 22821 - RNA, 20 nt, Artificial Sequence
  HTT spacer sequence GTCN PAM
aaguaagaaaaugacuuucc

SEQ ID NO: 22822 - RNA, 20 nt, Artificial Sequence
  HTT spacer sequence GTCN PAM
uuacauuugcagaucauuaa

SEQ ID NO: 22823 - RNA, 20 nt, Artificial Sequence
  HTT spacer sequence GTCN PAM
uguguuuacaaaggaaugaa

SEQ ID NO: 22824 - RNA, 20 nt, Artificial Sequence
  HTT spacer sequence GTCN PAM
aauuauagccacauguaagu

SEQ ID NO: 22825 - RNA, 20 nt, Artificial Sequence
  HTT spacer sequence GTCN PAM
gucuuaauaggauauaauag

SEQ ID NO: 22826 - RNA, 20 nt, Artificial Sequence
  HTT spacer sequence GTCN PAM
uaauaggauauaauagggac

SEQ ID NO: 22827 - RNA, 20 nt, Artificial Sequence
  HTT spacer sequence GTCN PAM
cuauuauauccuauuaagac

SEQ ID NO: 22828 - RNA, 20 nt, Artificial Sequence
  HTT spacer sequence GTCN PAM
uucacaauagcuaaaauuug

SEQ ID NO: 22829 - RNA, 20 nt, Artificial Sequence
  HTT spacer sequence GTCN PAM
ugccauguugccuaggcuga

SEQ ID NO: 22830 - RNA, 20 nt, Artificial Sequence
  HTT spacer sequence GTCN PAM
uucuuaucuucuuuuuuaau

SEQ ID NO: 22831 - RNA, 20 nt, Artificial Sequence
  HTT spacer sequence GTCN PAM
gugggaaacugccaugcuuu

SEQ ID NO: 22832 - RNA, 20 nt, Artificial Sequence
  HTT spacer sequence GTCN PAM
aggcccagaggcagugagca

SEQ ID NO: 22833 - RNA, 20 nt, Artificial Sequence
  HTT spacer sequence GTCN PAM
gcucaccccuacucugaaug

SEQ ID NO: 22834 - RNA, 20 nt, Artificial Sequence
  HTT spacer sequence GTCN PAM
gaaggagcccugcuugcccu

SEQ ID NO: 22835 - RNA, 20 nt, Artificial Sequence
  HTT spacer sequence GTCN PAM
ccgcaugagggcaagcaggg

SEQ ID NO: 22836 - RNA, 20 nt, Artificial Sequence
  HTT spacer sequence GTCN PAM
acaguaauucuuucgcuuau

SEQ ID NO: 22837 - RNA, 20 nt, Artificial Sequence
  HTT spacer sequence GTCN PAM
uccgaaaugaauuuguaggg

SEQ ID NO: 22838 - RNA, 20 nt, Artificial Sequence
  HTT spacer sequence GTCN PAM
ugagugagcacaaugguaaa

SEQ ID NO: 22839 - RNA, 20 nt, Artificial Sequence
  HTT spacer sequence GTCN PAM
acucaauuccuuuaccauug

SEQ ID NO: 22840 - RNA, 20 nt, Artificial Sequence
  HTT spacer sequence GTCN PAM
ugguuuuaggccacagacug

SEQ ID NO: 22841 - RNA, 20 nt, Artificial Sequence
  HTT spacer sequence GTCN PAM
guggccuaaaaccaugacag

SEQ ID NO: 22842 - RNA, 20 nt, Artificial Sequence
  HTT spacer sequence GTCN PAM
gaaguacgugcucuuuccac

SEQ ID NO: 22843 - RNA, 20 nt, Artificial Sequence
  HTT spacer sequence GTCN PAM
gcccacgucugaaguacgug

SEQ ID NO: 22844 - RNA, 20 nt, Artificial Sequence
  HTT spacer sequence GTCN PAM
ggguccugucguaucacuuc

SEQ ID NO: 22845 - RNA, 20 nt, Artificial Sequence
  HTT spacer sequence GTCN PAM
ugucguaucacuuccagcag

SEQ ID NO: 22846 - RNA, 20 nt, Artificial Sequence
  HTT spacer sequence GTCN PAM
uaucacuuccagcagcguga

SEQ ID NO: 22847 - RNA, 20 nt, Artificial Sequence
  HTT spacer sequence GTCN PAM
gcuuuccauucccuuucucu

SEQ ID NO: 22848 - RNA, 20 nt, Artificial Sequence
  HTT spacer sequence GTCN PAM
uuaucuuggaauuacgggug

SEQ ID NO: 22849 - RNA, 20 nt, Artificial Sequence
  HTT spacer sequence GTCN PAM
uuauuacuuccaauauuuuc

SEQ ID NO: 22850 - RNA, 20 nt, Artificial Sequence
  HTT spacer sequence GTCN PAM
cugccagugagggucucauc

SEQ ID NO: 22851 - RNA, 20 nt, Artificial Sequence
  HTT spacer sequence GTCN PAM
caucaagcaaagagcuuccu

SEQ ID NO: 22852 - RNA, 20 nt, Artificial Sequence
  HTT spacer sequence GTCN PAM
accuggcauuucuuaggcca

SEQ ID NO: 22853 - RNA, 20 nt, Artificial Sequence
  HTT spacer sequence GTCN PAM
agugcgagccacaggaaaaa

SEQ ID NO: 22854 - RNA, 20 nt, Artificial Sequence
  HTT spacer sequence GTCN PAM
ccucuuagucuucacugugc

SEQ ID NO: 22855 - RNA, 20 nt, Artificial Sequence
  HTT spacer sequence GTCN PAM
ucacugugcauuguuugauu

SEQ ID NO: 22856 - RNA, 20 nt, Artificial Sequence
  HTT spacer sequence GTCN PAM
gccgacaugccgcucagcuc

SEQ ID NO: 22857 - RNA, 20 nt, Artificial Sequence
  HTT spacer sequence GTCN PAM
gcugacaaaagugcuaugaa

SEQ ID NO: 22858 - RNA, 20 nt, Artificial Sequence
  HTT spacer sequence GTCN PAM
uuucuuguuuucugaguuua

SEQ ID NO: 22859 - RNA, 20 nt, Artificial Sequence
  HTT spacer sequence GTCN PAM
cccgccucccauucugucac

SEQ ID NO: 22860 - RNA, 20 nt, Artificial Sequence
  HTT spacer sequence GTCN PAM
cucuucacaccugccagcuu

SEQ ID NO: 22861 - RNA, 20 nt, Artificial Sequence
  HTT spacer sequence GTCN PAM
auuaguuacccguguuucuu

SEQ ID NO: 22862 - RNA, 20 nt, Artificial Sequence
  HTT spacer sequence GTCN PAM
auuucucuggccccugggac

SEQ ID NO: 22863 - RNA, 20 nt, Artificial Sequence
  HTT spacer sequence GTCN PAM
caggggccagagaaauugac

SEQ ID NO: 22864 - RNA, 20 nt, Artificial Sequence
  HTT spacer sequence GTCN PAM
cagugucccaggggccagag

SEQ ID NO: 22865 - RNA, 20 nt, Artificial Sequence
  HTT spacer sequence GTCN PAM
aaaaaaaaaaaaaaaaagag

SEQ ID NO: 22866 - RNA, 20 nt, Artificial Sequence
  HTT spacer sequence GTCN PAM
aggcuggagcgcaauggcac

SEQ ID NO: 22867 - RNA, 20 nt, Artificial Sequence
  HTT spacer sequence GTCN PAM
cugcagccucaaccuuccag

SEQ ID NO: 22868 - RNA, 20 nt, Artificial Sequence
  HTT spacer sequence GTCN PAM
cccugcacaaagcagcuaac

SEQ ID NO: 22869 - RNA, 20 nt, Artificial Sequence
  HTT spacer sequence GTCN PAM
cacucugucacccaggcugg

SEQ ID NO: 22870 - RNA, 20 nt, Artificial Sequence
  HTT spacer sequence GTCN PAM
cacaccaccaugccuggcua

SEQ ID NO: 22871 - RNA, 20 nt, Artificial Sequence
  HTT spacer sequence GTCN PAM
cagcuacucagaaggcugug

SEQ ID NO: 22872 - RNA, 20 nt, Artificial Sequence
  HTT spacer sequence GTCN PAM
gggcugcagugagccauuau

SEQ ID NO: 22873 - RNA, 20 nt, Artificial Sequence
  HTT spacer sequence GTCN PAM
cccaggcuggagugcagugg

SEQ ID NO: 22874 - RNA, 20 nt, Artificial Sequence
  HTT spacer sequence GTCN PAM
cuagguuccuugggagaggc

SEQ ID NO: 22875 - RNA, 20 nt, Artificial Sequence
  HTT spacer sequence GTCN PAM
ugauguauuaaaacaguaac

SEQ ID NO: 22876 - RNA, 20 nt, Artificial Sequence
  HTT spacer sequence GTCN PAM
ccacgcccggcuaauuuuug

SEQ ID NO: 22877 - RNA, 20 nt, Artificial Sequence
  HTT spacer sequence GTCN PAM
cccagguuucaagcgauucu

SEQ ID NO: 22878 - RNA, 20 nt, Artificial Sequence
  HTT spacer sequence GTCN PAM
uuagguuaguuuagccuacg

SEQ ID NO: 22879 - RNA, 20 nt, Artificial Sequence
  HTT spacer sequence GTCN PAM
uggagccgguuucucccagc

SEQ ID NO: 22880 - RNA, 20 nt, Artificial Sequence
  HTT spacer sequence GTCN PAM
cuuacacuauuggaaauaug

SEQ ID NO: 22881 - RNA, 20 nt, Artificial Sequence
  HTT spacer sequence GTCN PAM
gagggcccuggguguuuuuu

SEQ ID NO: 22882 - RNA, 20 nt, Artificial Sequence
  HTT spacer sequence GTCN PAM
cugauauaaaauggugcaaa

SEQ ID NO: 22883 - RNA, 20 nt, Artificial Sequence
  HTT spacer sequence GTCN PAM
ucaagucccugauauaaaau

SEQ ID NO: 22884 - RNA, 20 nt, Artificial Sequence
  HTT spacer sequence GTCN PAM
cacagcaggccccuuucccu

SEQ ID NO: 22885 - RNA, 20 nt, Artificial Sequence
  HTT spacer sequence GTCN PAM
cccuugucaccuuguaagcc

SEQ ID NO: 22886 - RNA, 20 nt, Artificial Sequence
  HTT spacer sequence GTCN PAM
ccuuguaagccuggcccucg

SEQ ID NO: 22887 - RNA, 20 nt, Artificial Sequence
  HTT spacer sequence GTCN PAM
ugcugcucccacacccccug

SEQ ID NO: 22888 - RNA, 20 nt, Artificial Sequence
  HTT spacer sequence GTCN PAM
ucacuucauuguaccuuugc

SEQ ID NO: 22889 - RNA, 20 nt, Artificial Sequence
  HTT spacer sequence GTCN PAM
uucugagagacuccugcuca

SEQ ID NO: 22890 - RNA, 20 nt, Artificial Sequence
  HTT spacer sequence GTCN PAM
cucagaaugacaggaagagg

SEQ ID NO: 22891 - RNA, 20 nt, Artificial Sequence
  HTT spacer sequence GTCN PAM
gcucagauggucacgucaga

SEQ ID NO: 22892 - RNA, 20 nt, Artificial Sequence
  HTT spacer sequence GTCN PAM
cgucagacgaugagcuucuu

SEQ ID NO: 22893 - RNA, 20 nt, Artificial Sequence
  HTT spacer sequence GTCN PAM
gacgaugagcuucuugggag

SEQ ID NO: 22894 - RNA, 20 nt, Artificial Sequence
  HTT spacer sequence GTCN PAM
gacgugaccaucugagcaga

SEQ ID NO: 22895 - RNA, 20 nt, Artificial Sequence
  HTT spacer sequence GTCN PAM
uugaucucauuucuuccuau

SEQ ID NO: 22896 - RNA, 20 nt, Artificial Sequence
  HTT spacer sequence GTCN PAM
aucagaauaggaagaaauga

SEQ ID NO: 22897 - RNA, 20 nt, Artificial Sequence
  HTT spacer sequence GTCN PAM
uuaagagauauuuaucccau

SEQ ID NO: 22898 - RNA, 20 nt, Artificial Sequence
  HTT spacer sequence GTCN PAM
cugguccuuaagagauauuu

SEQ ID NO: 22899 - RNA, 20 nt, Artificial Sequence
  HTT spacer sequence GTCN PAM
gccccacugccaagccuggu

SEQ ID NO: 22900 - RNA, 20 nt, Artificial Sequence
  HTT spacer sequence GTCN PAM
ucuagacacagagguggucg

SEQ ID NO: 22901 - RNA, 20 nt, Artificial Sequence
  HTT spacer sequence GTCN PAM
agaggacucauagccagggc

SEQ ID NO: 22902 - RNA, 20 nt, Artificial Sequence
  HTT spacer sequence GTCN PAM
ccugaguugaggaagccuug

SEQ ID NO: 22903 - RNA, 20 nt, Artificial Sequence
  HTT spacer sequence GTCN PAM
ggugguauuggaccauggaa

SEQ ID NO: 22904 - RNA, 20 nt, Artificial Sequence
  HTT spacer sequence GTCN PAM
aauaccaccagacucuuacc

SEQ ID NO: 22905 - RNA, 20 nt, Artificial Sequence
  HTT spacer sequence GTCN PAM
ccugugaagugugauuuacu

SEQ ID NO: 22906 - RNA, 20 nt, Artificial Sequence
  HTT spacer sequence GTCN PAM
caagaugagcuggauuuucu

SEQ ID NO: 22907 - RNA, 20 nt, Artificial Sequence
  HTT spacer sequence GTCN PAM
gccccauccaccgcuguguc

SEQ ID NO: 22908 - RNA, 20 nt, Artificial Sequence
  HTT spacer sequence GTCN PAM
acgggacucaccaucaguag

SEQ ID NO: 22909 - RNA, 20 nt, Artificial Sequence
  HTT spacer sequence GTCN PAM
cguggacacagcgguggaug

SEQ ID NO: 22910 - RNA, 20 nt, Artificial Sequence
  HTT spacer sequence GTCN PAM
uucauucaacaaaugcuuag

SEQ ID NO: 22911 - RNA, 20 nt, Artificial Sequence
  HTT spacer sequence GTCN PAM
cagugacauucccaccucag

SEQ ID NO: 22912 - RNA, 20 nt, Artificial Sequence
  HTT spacer sequence GTCN PAM
cugggaccaucggucauuca

SEQ ID NO: 22913 - RNA, 20 nt, Artificial Sequence
  HTT spacer sequence GTCN PAM
cagcuacucagggggcugag

SEQ ID NO: 22914 - RNA, 20 nt, Artificial Sequence
  HTT spacer sequence GTCN PAM
uuaaugaacguggcacaauu

SEQ ID NO: 22915 - RNA, 20 nt, Artificial Sequence
  HTT spacer sequence GTCN PAM
ucaaaucuguauaacuaugc

SEQ ID NO: 22916 - RNA, 20 nt, Artificial Sequence
  HTT spacer sequence GTCN PAM
ucacaugugaguuguuugcu

SEQ ID NO: 22917 - RNA, 20 nt, Artificial Sequence
  HTT spacer sequence GTCN PAM
caugugaguuguuugcugag

SEQ ID NO: 22918 - RNA, 20 nt, Artificial Sequence
  HTT spacer sequence GTCN PAM
ugccuguuugccguggcuca

SEQ ID NO: 22919 - RNA, 20 nt, Artificial Sequence
  HTT spacer sequence GTCN PAM
cuacaagaaacaacaacaaa

SEQ ID NO: 22920 - RNA, 20 nt, Artificial Sequence
  HTT spacer sequence GTCN PAM
acccauuagaugugaaaggc

SEQ ID NO: 22921 - RNA, 20 nt, Artificial Sequence
  HTT spacer sequence GTCN PAM
cucuaacaaagucuacccau

SEQ ID NO: 22922 - RNA, 20 nt, Artificial Sequence
  HTT spacer sequence GTCN PAM
acuuucugcauccaacuuuc

SEQ ID NO: 22923 - RNA, 20 nt, Artificial Sequence
  HTT spacer sequence GTCN PAM
guauuucaucuuuuuaaaau

SEQ ID NO: 22924 - RNA, 20 nt, Artificial Sequence
  HTT spacer sequence GTCN PAM
uuccccuguguuuaggcaag

SEQ ID NO: 22925 - RNA, 20 nt, Artificial Sequence
  HTT spacer sequence GTCN PAM
uaauuuucaauuaaugauug

SEQ ID NO: 22926 - RNA, 20 nt, Artificial Sequence
  HTT spacer sequence GTCN PAM
gggucuugcugugucgccca

SEQ ID NO: 22927 - RNA, 20 nt, Artificial Sequence
  HTT spacer sequence GTCN PAM
ugcugugucgcccaggcugg

SEQ ID NO: 22928 - RNA, 20 nt, Artificial Sequence
  HTT spacer sequence GTCN PAM
cccaggcuggagugcagugg

SEQ ID NO: 22929 - RNA, 20 nt, Artificial Sequence
  HTT spacer sequence GTCN PAM
uuugagcccaguaguucaag

SEQ ID NO: 22930 - RNA, 20 nt, Artificial Sequence
  HTT spacer sequence GTCN PAM
cagcuaugcagaaagcugag

SEQ ID NO: 22931 - RNA, 20 nt, Artificial Sequence
  HTT spacer sequence GTCN PAM
ugcuauguugcccaggcugu

SEQ ID NO: 22932 - RNA, 20 nt, Artificial Sequence
  HTT spacer sequence GTCN PAM
uccugccuucccucccaaag

SEQ ID NO: 22933 - RNA, 20 nt, Artificial Sequence
  HTT spacer sequence GTCN PAM
gaacguuuucucccucuugu

SEQ ID NO: 22934 - RNA, 20 nt, Artificial Sequence
  HTT spacer sequence GTCN PAM
acagcaagaaacaagaggga

SEQ ID NO: 22935 - RNA, 20 nt, Artificial Sequence
  HTT spacer sequence GTCN PAM
uguugccccuggugcugucc

SEQ ID NO: 22936 - RNA, 20 nt, Artificial Sequence
  HTT spacer sequence GTCN PAM
ucuugucacauagcaugugu

SEQ ID NO: 22937 - RNA, 20 nt, Artificial Sequence
  HTT spacer sequence GTCN PAM
cauagcaugugucacagagc

SEQ ID NO: 22938 - RNA, 20 nt, Artificial Sequence
  HTT spacer sequence GTCN PAM
cagagcagggugcagauggc

SEQ ID NO: 22939 - RNA, 20 nt, Artificial Sequence
  HTT spacer sequence GTCN PAM
ccaagcagccaucugcaccc

SEQ ID NO: 22940 - RNA, 20 nt, Artificial Sequence
  HTT spacer sequence GTCN PAM
acuauuacagggucuccaag

SEQ ID NO: 22941 - RNA, 20 nt, Artificial Sequence
  HTT spacer sequence GTCN PAM
gcagcaugggugcacacucc

SEQ ID NO: 22942 - RNA, 20 nt, Artificial Sequence
  HTT spacer sequence GTCN PAM
uacccagaaugcaaggaugg

SEQ ID NO: 22943 - RNA, 20 nt, Artificial Sequence
  HTT spacer sequence GTCN PAM
uacagucuaguagagcacac

SEQ ID NO: 22944 - RNA, 20 nt, Artificial Sequence
  HTT spacer sequence GTCN PAM
aguagagcacacauggcaag

SEQ ID NO: 22945 - RNA, 20 nt, Artificial Sequence
  HTT spacer sequence GTCN PAM
guggcuccugccgagaagag

SEQ ID NO: 22946 - RNA, 20 nt, Artificial Sequence
  HTT spacer sequence GTCN PAM
ucuucucggcaggagccacu

SEQ ID NO: 22947 - RNA, 20 nt, Artificial Sequence
  HTT spacer sequence GTCN PAM
aaggcggagauugagggcag

SEQ ID NO: 22948 - RNA, 20 nt, Artificial Sequence
  HTT spacer sequence GTCN PAM
ugggggacuuggaaugcuag

SEQ ID NO: 22949 - RNA, 20 nt, Artificial Sequence
  HTT spacer sequence GTCN PAM
cccacgacugcccucaaucu

SEQ ID NO: 22950 - RNA, 20 nt, Artificial Sequence
  HTT spacer sequence GTCN PAM
ccuuuuaugccucugccaga

SEQ ID NO: 22951 - RNA, 20 nt, Artificial Sequence
  HTT spacer sequence GTCN PAM
uacaugaauuagauaagcau

SEQ ID NO: 22952 - RNA, 20 nt, Artificial Sequence
  HTT spacer sequence GTCN PAM
gauuccuaaaucuugguauc

SEQ ID NO: 22953 - RNA, 20 nt, Artificial Sequence
  HTT spacer sequence GTCN PAM
aagguuguguccguagcucc

SEQ ID NO: 22954 - RNA, 20 nt, Artificial Sequence
  HTT spacer sequence GTCN PAM
guagcuccugacuuagccug

SEQ ID NO: 22955 - RNA, 20 nt, Artificial Sequence
  HTT spacer sequence GTCN PAM
ggagcuacggacacaaccuu

SEQ ID NO: 22956 - RNA, 20 nt, Artificial Sequence
  HTT spacer sequence GTCN PAM
cuuuauguuucuuuauguuu

SEQ ID NO: 22957 - RNA, 20 nt, Artificial Sequence
  HTT spacer sequence GTCN PAM
uuccccagugcuaacuccug

SEQ ID NO: 22958 - RNA, 20 nt, Artificial Sequence
  HTT spacer sequence GTCN PAM
ugcuaaguuagccaggcagg

SEQ ID NO: 22959 - RNA, 20 nt, Artificial Sequence
  HTT spacer sequence GTCN PAM
cuucucuuggggaccacagu

SEQ ID NO: 22960 - RNA, 20 nt, Artificial Sequence
  HTT spacer sequence GTCN PAM
ccaagagaagagacagggaa

SEQ ID NO: 22961 - RNA, 20 nt, Artificial Sequence
  HTT spacer sequence GTCN PAM
ucugaugccgaugaccacag

SEQ ID NO: 22962 - RNA, 20 nt, Artificial Sequence
  HTT spacer sequence GTCN PAM
ucggcaucagaggacugugg

SEQ ID NO: 22963 - RNA, 20 nt, Artificial Sequence
  HTT spacer sequence GTCN PAM
gggucucucuaugcuaccca

SEQ ID NO: 22964 - RNA, 20 nt, Artificial Sequence
  HTT spacer sequence GTCN PAM
cucuaugcuacccaggcugg

SEQ ID NO: 22965 - RNA, 20 nt, Artificial Sequence
  HTT spacer sequence GTCN PAM
cuuaggcccaggaguuucag

SEQ ID NO: 22966 - RNA, 20 nt, Artificial Sequence
  HTT spacer sequence GTCN PAM
aaacugcagugaggcauaau

SEQ ID NO: 22967 - RNA, 20 nt, Artificial Sequence
  HTT spacer sequence GTCN PAM
agaguucgagaccagccugg

SEQ ID NO: 22968 - RNA, 20 nt, Artificial Sequence
  HTT spacer sequence GTCN PAM
cgaacucuugaccucaagug

SEQ ID NO: 22969 - RNA, 20 nt, Artificial Sequence
  HTT spacer sequence GTCN PAM
cuacuaaaaauacaaaaauu

SEQ ID NO: 22970 - RNA, 20 nt, Artificial Sequence
  HTT spacer sequence GTCN PAM
cccaggcuggaguguagugg

SEQ ID NO: 22971 - RNA, 20 nt, Artificial Sequence
  HTT spacer sequence GTCN PAM
cacucugucgcccaggcugg

SEQ ID NO: 22972 - RNA, 20 nt, Artificial Sequence
  HTT spacer sequence GTCN PAM
caaaaaacaaacaaacaaac

SEQ ID NO: 22973 - RNA, 20 nt, Artificial Sequence
  HTT spacer sequence GTCN PAM
uuagcaaaaguucuuugguu

SEQ ID NO: 22974 - RNA, 20 nt, Artificial Sequence
  HTT spacer sequence GTCN PAM
cucagaggccgggcacagug

SEQ ID NO: 22975 - RNA, 20 nt, Artificial Sequence
  HTT spacer sequence GTCN PAM
ggaguucaagaccagccugg

SEQ ID NO: 22976 - RNA, 20 nt, Artificial Sequence
  HTT spacer sequence GTCN PAM
ugaacuccugacuucaggug

SEQ ID NO: 22977 - RNA, 20 nt, Artificial Sequence
  HTT spacer sequence GTCN PAM
cuacuaaaaauacaaaaauu

SEQ ID NO: 22978 - RNA, 20 nt, Artificial Sequence
  HTT spacer sequence GTCN PAM
cagcuacuugaggggcugag

SEQ ID NO: 22979 - RNA, 20 nt, Artificial Sequence
  HTT spacer sequence GTCN PAM
ccuaggcuggagugcaaugg

SEQ ID NO: 22980 - RNA, 20 nt, Artificial Sequence
  HTT spacer sequence GTCN PAM
cacucugucaccuaggcugg

SEQ ID NO: 22981 - RNA, 20 nt, Artificial Sequence
  HTT spacer sequence GTCN PAM
caaaaaaaaaaaaaaaaaaa

SEQ ID NO: 22982 - RNA, 20 nt, Artificial Sequence
  HTT spacer sequence GTCN PAM
cucaguaucauucccuucug

SEQ ID NO: 22983 - RNA, 20 nt, Artificial Sequence
  HTT spacer sequence GTCN PAM
caaaaaaaaaaaaaaaaaaa

SEQ ID NO: 22984 - RNA, 20 nt, Artificial Sequence
  HTT spacer sequence GTCN PAM
ugcucugucgcccaggcugg

SEQ ID NO: 22985 - RNA, 20 nt, Artificial Sequence
  HTT spacer sequence GTCN PAM
cccaggcuggugugcagugg

SEQ ID NO: 22986 - RNA, 20 nt, Artificial Sequence
  HTT spacer sequence GTCN PAM
cagcugcuugggaggcugag

SEQ ID NO: 22987 - RNA, 20 nt, Artificial Sequence
  HTT spacer sequence GTCN PAM
cuacuaaaaaaaauauaaaa

SEQ ID NO: 22988 - RNA, 20 nt, Artificial Sequence
  HTT spacer sequence GTCN PAM
cgaucuccugaccuugugau

SEQ ID NO: 22989 - RNA, 20 nt, Artificial Sequence
  HTT spacer sequence GTCN PAM
ggagaucgagaccauccugg

SEQ ID NO: 22990 - RNA, 20 nt, Artificial Sequence
  HTT spacer sequence GTCN PAM
agauuccaucccugaccauc

SEQ ID NO: 22991 - RNA, 20 nt, Artificial Sequence
  HTT spacer sequence GTCN PAM
gggauggaaucuagacaucu

SEQ ID NO: 22992 - RNA, 20 nt, Artificial Sequence
  HTT spacer sequence GTCN PAM
acuacuuuauuuaagaaaug

SEQ ID NO: 22993 - RNA, 20 nt, Artificial Sequence
  HTT spacer sequence GTCN PAM
uccacguggcuauuucacug

SEQ ID NO: 22994 - RNA, 20 nt, Artificial Sequence
  HTT spacer sequence GTCN PAM
augaguguugcagagccauc

SEQ ID NO: 22995 - RNA, 20 nt, Artificial Sequence
  HTT spacer sequence GTCN PAM
gucugcugugccuccugcag

SEQ ID NO: 22996 - RNA, 20 nt, Artificial Sequence
  HTT spacer sequence GTCN PAM
gcugugccuccugcaggcga

SEQ ID NO: 22997 - RNA, 20 nt, Artificial Sequence
  HTT spacer sequence GTCN PAM
gguucgccugcaggaggcac

SEQ ID NO: 22998 - RNA, 20 nt, Artificial Sequence
  HTT spacer sequence GTCN PAM
ucuccaccggugcuguuucc

SEQ ID NO: 22999 - RNA, 20 nt, Artificial Sequence
  HTT spacer sequence GTCN PAM
uagaagugggugaauucaua

SEQ ID NO: 23000 - RNA, 20 nt, Artificial Sequence
  HTT spacer sequence GTCN PAM
gauauugccagauuccgcuc

SEQ ID NO: 23001 - RNA, 20 nt, Artificial Sequence
  HTT spacer sequence GTCN PAM
gcauucccaccagcagugca

SEQ ID NO: 23002 - RNA, 20 nt, Artificial Sequence
  HTT spacer sequence GTCN PAM
gcuggcgaggcuguggggaa

SEQ ID NO: 23003 - RNA, 20 nt, Artificial Sequence
  HTT spacer sequence GTCN PAM
guuuguuagcugggaauugg

SEQ ID NO: 23004 - RNA, 20 nt, Artificial Sequence
  HTT spacer sequence GTCN PAM
uauuuuucuuauaaaaaugg

SEQ ID NO: 23005 - RNA, 20 nt, Artificial Sequence
  HTT spacer sequence GTCN PAM
caacauguuagcacucuacu

SEQ ID NO: 23006 - RNA, 20 nt, Artificial Sequence
  HTT spacer sequence GTCN PAM
ugaacuccugggcucaagcg

SEQ ID NO: 23007 - RNA, 20 nt, Artificial Sequence
  HTT spacer sequence GTCN PAM
uguugcccaggcuggucuug

SEQ ID NO: 23008 - RNA, 20 nt, Artificial Sequence
  HTT spacer sequence GTCN PAM
cuacaaaagaaaagaaaaga

SEQ ID NO: 23009 - RNA, 20 nt, Artificial Sequence
  HTT spacer sequence GTCN PAM
caguuuccuccccuuguaca

SEQ ID NO: 23010 - RNA, 20 nt, Artificial Sequence
  HTT spacer sequence GTCN PAM
uggcucugccauguacuauc

SEQ ID NO: 23011 - RNA, 20 nt, Artificial Sequence
  HTT spacer sequence GTCN PAM
gaguccuggcucugccaugu

SEQ ID NO: 23012 - RNA, 20 nt, Artificial Sequence
  HTT spacer sequence GTCN PAM
gugcuccucaccccugugcu

SEQ ID NO: 23013 - RNA, 20 nt, Artificial Sequence
  HTT spacer sequence GTCN PAM
gaggccggcuuuccucucua

SEQ ID NO: 23014 - RNA, 20 nt, Artificial Sequence
  HTT spacer sequence GTCN PAM
gcaugaugcuuuagagagga

SEQ ID NO: 23015 - RNA, 20 nt, Artificial Sequence
  HTT spacer sequence GTCN PAM
uuuuaaaacagucugcauga

SEQ ID NO: 23016 - RNA, 20 nt, Artificial Sequence
  HTT spacer sequence GTCN PAM
cauauuuuuaguuuuuagca

SEQ ID NO: 23017 - RNA, 20 nt, Artificial Sequence
  HTT spacer sequence GTCN PAM
gcuuccagggcuggcuaauc

SEQ ID NO: 23018 - RNA, 20 nt, Artificial Sequence
  HTT spacer sequence GTCN PAM
caaaaaaauuauaaagaaaa

SEQ ID NO: 23019 - RNA, 20 nt, Artificial Sequence
  HTT spacer sequence GTCN PAM
aggcugcggugaaccaugau

SEQ ID NO: 23020 - RNA, 20 nt, Artificial Sequence
  HTT spacer sequence GTCN PAM
cagcuacucuggaggcugag

SEQ ID NO: 23021 - RNA, 20 nt, Artificial Sequence
  HTT spacer sequence GTCN PAM
cuauaaaaaaagauuuuuaa

SEQ ID NO: 23022 - RNA, 20 nt, Artificial Sequence
  HTT spacer sequence GTCN PAM
ugucauguuucccaggcugg

SEQ ID NO: 23023 - RNA, 20 nt, Artificial Sequence
  HTT spacer sequence GTCN PAM
uguuucccaggcuggucuca

SEQ ID NO: 23024 - RNA, 20 nt, Artificial Sequence
  HTT spacer sequence GTCN PAM
caaaauguggaacucaagua

SEQ ID NO: 23025 - RNA, 20 nt, Artificial Sequence
  HTT spacer sequence GTCN PAM
gaggauuacuugaguuccac

SEQ ID NO: 23026 - RNA, 20 nt, Artificial Sequence
  HTT spacer sequence GTCN PAM
ggccuaauuuguuaguucca

SEQ ID NO: 23027 - RNA, 20 nt, Artificial Sequence
  HTT spacer sequence GTCN PAM
gggaaauaauaaacaaaauu

SEQ ID NO: 23028 - RNA, 20 nt, Artificial Sequence
  HTT spacer sequence GTCN PAM
cuguguauaguacugguacu

SEQ ID NO: 23029 - RNA, 20 nt, Artificial Sequence
  HTT spacer sequence GTCN PAM
gaguaccaguacuauacaca

SEQ ID NO: 23030 - RNA, 20 nt, Artificial Sequence
  HTT spacer sequence GTCN PAM
uacaacuuccagguacauca

SEQ ID NO: 23031 - RNA, 20 nt, Artificial Sequence
  HTT spacer sequence GTCN PAM
uaucaagugguggccuauga

SEQ ID NO: 23032 - RNA, 20 nt, Artificial Sequence
  HTT spacer sequence GTCN PAM
uuacuucccccgugaccugu

SEQ ID NO: 23033 - RNA, 20 nt, Artificial Sequence
  HTT spacer sequence GTCN PAM
cgggggaaguaaugacaccg

SEQ ID NO: 23034 - RNA, 20 nt, Artificial Sequence
  HTT spacer sequence GTCN PAM
uguguguucaaauauguuau

SEQ ID NO: 23035 - RNA, 20 nt, Artificial Sequence
  HTT spacer sequence GTCN PAM
gaaauccggauguguccugu

SEQ ID NO: 23036 - RNA, 20 nt, Artificial Sequence
  HTT spacer sequence GTCN PAM
uucugggaucucuguggcca

SEQ ID NO: 23037 - RNA, 20 nt, Artificial Sequence
  HTT spacer sequence GTCN PAM
gcuacauggguucgugagag

SEQ ID NO: 23038 - RNA, 20 nt, Artificial Sequence
  HTT spacer sequence GTCN PAM
uuguccuuucuauccgggug

SEQ ID NO: 23039 - RNA, 20 nt, Artificial Sequence
  HTT spacer sequence GTCN PAM
uuucuauccgggugccugag

SEQ ID NO: 23040 - RNA, 20 nt, Artificial Sequence
  HTT spacer sequence GTCN PAM
auucaggguggauuucucug

SEQ ID NO: 23041 - RNA, 20 nt, Artificial Sequence
  HTT spacer sequence GTCN PAM
aaaccgaggccccgguccau

SEQ ID NO: 23042 - RNA, 20 nt, Artificial Sequence
  HTT spacer sequence GTCN PAM
gaguguugaggcugcugggg

SEQ ID NO: 23043 - RNA, 20 nt, Artificial Sequence
  HTT spacer sequence GTCN PAM
ugaggucacucagcgaagug

SEQ ID NO: 23044 - RNA, 20 nt, Artificial Sequence
  HTT spacer sequence GTCN PAM
cucagcgaagugagggcaga

SEQ ID NO: 23045 - RNA, 20 nt, Artificial Sequence
  HTT spacer sequence GTCN PAM
ucccgauucugcccucacuu

SEQ ID NO: 23046 - RNA, 20 nt, Artificial Sequence
  HTT spacer sequence GTCN PAM
ccucacucuaccaguguccu

SEQ ID NO: 23047 - RNA, 20 nt, Artificial Sequence
  HTT spacer sequence GTCN PAM
uccccugugcaccacggccu

SEQ ID NO: 23048 - RNA, 20 nt, Artificial Sequence
  HTT spacer sequence GTCN PAM
ugcaggaagaccccaagguc

SEQ ID NO: 23049 - RNA, 20 nt, Artificial Sequence
  HTT spacer sequence GTCN PAM
uccugcaggacucugcgagg

SEQ ID NO: 23050 - RNA, 20 nt, Artificial Sequence
  HTT spacer sequence GTCN PAM
uguggcuuuccgcucuugcg

SEQ ID NO: 23051 - RNA, 20 nt, Artificial Sequence
  HTT spacer sequence GTCN PAM
ugugggguuuuucacugccc

SEQ ID NO: 23052 - RNA, 20 nt, Artificial Sequence
  HTT spacer sequence GTCN PAM
ugccaucuaucccagggcag

SEQ ID NO: 23053 - RNA, 20 nt, Artificial Sequence
  HTT spacer sequence GTCN PAM
cgucuugccaucuaucccag

SEQ ID NO: 23054 - RNA, 20 nt, Artificial Sequence
  HTT spacer sequence GTCN PAM
ggagggagccccuucaggag

SEQ ID NO: 23055 - RNA, 20 nt, Artificial Sequence
  HTT spacer sequence GTCN PAM
agggaaggcuccaccuccug

SEQ ID NO: 23056 - RNA, 20 nt, Artificial Sequence
  HTT spacer sequence GTCN PAM
cauucacaagggaaauggug

SEQ ID NO: 23057 - RNA, 20 nt, Artificial Sequence
  HTT spacer sequence GTCN PAM
accaguuugaaguguguaau

SEQ ID NO: 23058 - RNA, 20 nt, Artificial Sequence
  HTT spacer sequence GTCN PAM
ugcaaccaucaccaccaucu

SEQ ID NO: 23059 - RNA, 20 nt, Artificial Sequence
  HTT spacer sequence GTCN PAM
caaaaaaaaaaaaaaguugu

SEQ ID NO: 23060 - RNA, 20 nt, Artificial Sequence
  HTT spacer sequence GTCN PAM
cacucagucgcccaggcuag

SEQ ID NO: 23061 - RNA, 20 nt, Artificial Sequence
  HTT spacer sequence GTCN PAM
cccaggcuagaaugcagugg

SEQ ID NO: 23062 - RNA, 20 nt, Artificial Sequence
  HTT spacer sequence GTCN PAM
accucccaggcacaagcgau

SEQ ID NO: 23063 - RNA, 20 nt, Artificial Sequence
  HTT spacer sequence GTCN PAM
cuacuaaaaauacaaaaauu

SEQ ID NO: 23064 - RNA, 20 nt, Artificial Sequence
  HTT spacer sequence GTCN PAM
aggcuggucucaaacuccug

SEQ ID NO: 23065 - RNA, 20 nt, Artificial Sequence
  HTT spacer sequence GTCN PAM
caaacuccugaucucaggug

SEQ ID NO: 23066 - RNA, 20 nt, Artificial Sequence
  HTT spacer sequence GTCN PAM
auguugucacacacguugaa

SEQ ID NO: 23067 - RNA, 20 nt, Artificial Sequence
  HTT spacer sequence GTCN PAM
cacacguugaauguauacug

SEQ ID NO: 23068 - RNA, 20 nt, Artificial Sequence
  HTT spacer sequence GTCN PAM
auaaugaaaaguauacguuu

SEQ ID NO: 23069 - RNA, 20 nt, Artificial Sequence
  HTT spacer sequence GTCN PAM
cgauugguggggacuuggcu

SEQ ID NO: 23070 - RNA, 20 nt, Artificial Sequence
  HTT spacer sequence GTCN PAM
ccaccaaucgggacuaaacg

SEQ ID NO: 23071 - RNA, 20 nt, Artificial Sequence
  HTT spacer sequence GTCN PAM
gaucuaugaaaugauucagg

SEQ ID NO: 23072 - RNA, 20 nt, Artificial Sequence
  HTT spacer sequence GTCN PAM
cugaaucauuucauagauca

SEQ ID NO: 23073 - RNA, 20 nt, Artificial Sequence
  HTT spacer sequence GTCN PAM
aaugggaggaggucgaucaa

SEQ ID NO: 23074 - RNA, 20 nt, Artificial Sequence
  HTT spacer sequence GTCN PAM
aucaaagaaucaagaaugau

SEQ ID NO: 23075 - RNA, 20 nt, Artificial Sequence
  HTT spacer sequence GTCN PAM
ggcucuguagaggcugggaa

SEQ ID NO: 23076 - RNA, 20 nt, Artificial Sequence
  HTT spacer sequence GTCN PAM
gucaucuucagcaaguccug

SEQ ID NO: 23077 - RNA, 20 nt, Artificial Sequence
  HTT spacer sequence GTCN PAM
ucuucagcaaguccugguca

SEQ ID NO: 23078 - RNA, 20 nt, Artificial Sequence
  HTT spacer sequence GTCN PAM
uggucacccaccucccaggc

SEQ ID NO: 23079 - RNA, 20 nt, Artificial Sequence
  HTT spacer sequence GTCN PAM
cccaccucccaggcccugcc

SEQ ID NO: 23080 - RNA, 20 nt, Artificial Sequence
  HTT spacer sequence GTCN PAM
ucccuacugggcugcagggg

SEQ ID NO: 23081 - RNA, 20 nt, Artificial Sequence
  HTT spacer sequence GTCN PAM
accugugucuuggcccagca

SEQ ID NO: 23082 - RNA, 20 nt, Artificial Sequence
  HTT spacer sequence GTCN PAM
uggcccagcagggaggacac

SEQ ID NO: 23083 - RNA, 20 nt, Artificial Sequence
  HTT spacer sequence GTCN PAM
ucccugcugggccaagacac

SEQ ID NO: 23084 - RNA, 20 nt, Artificial Sequence
  HTT spacer sequence GTCN PAM
accugucuccuggcccagca

SEQ ID NO: 23085 - RNA, 20 nt, Artificial Sequence
  HTT spacer sequence GTCN PAM
ccuggcccagcagggaggac

SEQ ID NO: 23086 - RNA, 20 nt, Artificial Sequence
  HTT spacer sequence GTCN PAM
ucccugcugggccaggagac

SEQ ID NO: 23087 - RNA, 20 nt, Artificial Sequence
  HTT spacer sequence GTCN PAM
accugccuccuggcccagca

SEQ ID NO: 23088 - RNA, 20 nt, Artificial Sequence
  HTT spacer sequence GTCN PAM
ucccugcugggccaggaggc

SEQ ID NO: 23089 - RNA, 20 nt, Artificial Sequence
  HTT spacer sequence GTCN PAM
accugucucuuggcccagca

SEQ ID NO: 23090 - RNA, 20 nt, Artificial Sequence
  HTT spacer sequence GTCN PAM
cuuggcccagcagggaggac

SEQ ID NO: 23091 - RNA, 20 nt, Artificial Sequence
  HTT spacer sequence GTCN PAM
ucccugcugggccaagagac

SEQ ID NO: 23092 - RNA, 20 nt, Artificial Sequence
  HTT spacer sequence GTCN PAM
accugccuccuuccccaugc

SEQ ID NO: 23093 - RNA, 20 nt, Artificial Sequence
  HTT spacer sequence GTCN PAM
gaugaaaucccaguggcagg

SEQ ID NO: 23094 - RNA, 20 nt, Artificial Sequence
  HTT spacer sequence GTCN PAM
ggaaacuuuucucacuggcu

SEQ ID NO: 23095 - RNA, 20 nt, Artificial Sequence
  HTT spacer sequence GTCN PAM
uuuccagaucaugucuggaa

SEQ ID NO: 23096 - RNA, 20 nt, Artificial Sequence
  HTT spacer sequence GTCN PAM
augaaacaaggcuuggcuau

SEQ ID NO: 23097 - RNA, 20 nt, Artificial Sequence
  HTT spacer sequence GTCN PAM
aacuucauauaaaauugguc

SEQ ID NO: 23098 - RNA, 20 nt, Artificial Sequence
  HTT spacer sequence GTCN PAM
cagagacacucugaccugag

SEQ ID NO: 23099 - RNA, 20 nt, Artificial Sequence
  HTT spacer sequence GTCN PAM
cugggacuacaaucccuggc

SEQ ID NO: 23100 - RNA, 20 nt, Artificial Sequence
  HTT spacer sequence GTCN PAM
gagugucucugggacuacaa

SEQ ID NO: 23101 - RNA, 20 nt, Artificial Sequence
  HTT spacer sequence GTCN PAM
agcaccaggcccagagccag

SEQ ID NO: 23102 - RNA, 20 nt, Artificial Sequence
  HTT spacer sequence GTCN PAM
guccagcaccaggcccagag

SEQ ID NO: 23103 - RNA, 20 nt, Artificial Sequence
  HTT spacer sequence GTCN PAM
gccucagaggcccuuagcac

SEQ ID NO: 23104 - RNA, 20 nt, Artificial Sequence
  HTT spacer sequence GTCN PAM
cagcaaggagaugagcccca

SEQ ID NO: 23105 - RNA, 20 nt, Artificial Sequence
  HTT spacer sequence GTCN PAM
ccaccgcuuggggcucaucu

SEQ ID NO: 23106 - RNA, 20 nt, Artificial Sequence
  HTT spacer sequence GTCN PAM
cuggucccagaaugagccag

SEQ ID NO: 23107 - RNA, 20 nt, Artificial Sequence
  HTT spacer sequence GTCN PAM
cagaaugagccaguggcugu

SEQ ID NO: 23108 - RNA, 20 nt, Artificial Sequence
  HTT spacer sequence GTCN PAM
ggguccaucugccucuggga

SEQ ID NO: 23109 - RNA, 20 nt, Artificial Sequence
  HTT spacer sequence GTCN PAM
aucugccucugggacuggac

SEQ ID NO: 23110 - RNA, 20 nt, Artificial Sequence
  HTT spacer sequence GTCN PAM
cagaggcagauggacccuga

SEQ ID NO: 23111 - RNA, 20 nt, Artificial Sequence
  HTT spacer sequence GTCN PAM
agucccagaggcagauggac

SEQ ID NO: 23112 - RNA, 20 nt, Artificial Sequence
  HTT spacer sequence GTCN PAM
gggcagugaggggugguaac

SEQ ID NO: 23113 - RNA, 20 nt, Artificial Sequence
  HTT spacer sequence GTCN PAM
uaggcauugggggaaacagc

SEQ ID NO: 23114 - RNA, 20 nt, Artificial Sequence
  HTT spacer sequence GTCN PAM
ccgcccugccagcgagaacu

SEQ ID NO: 23115 - RNA, 20 nt, Artificial Sequence
  HTT spacer sequence GTCN PAM
guucucgcuggcagggcggg

SEQ ID NO: 23116 - RNA, 20 nt, Artificial Sequence
  HTT spacer sequence GTCN PAM
augcauuuguucuguuuccu

SEQ ID NO: 23117 - RNA, 20 nt, Artificial Sequence
  HTT spacer sequence GTCN PAM
uccccacagcccacacgucu

SEQ ID NO: 23118 - RNA, 20 nt, Artificial Sequence
  HTT spacer sequence GTCN PAM
uccagagugcggguccuccc

SEQ ID NO: 23119 - RNA, 20 nt, Artificial Sequence
  HTT spacer sequence GTCN PAM
gccugcugggcagagcagac

SEQ ID NO: 23120 - RNA, 20 nt, Artificial Sequence
  HTT spacer sequence GTCN PAM
gcucugcccagcaggccgac

SEQ ID NO: 23121 - RNA, 20 nt, Artificial Sequence
  HTT spacer sequence GTCN PAM
gcaauagcaaggccacagug

SEQ ID NO: 23122 - RNA, 20 nt, Artificial Sequence
  HTT spacer sequence GTCN PAM
cccucuaacccccuccugcu

SEQ ID NO: 23123 - RNA, 20 nt, Artificial Sequence
  HTT spacer sequence GTCN PAM
cgucccccucuaacccccuc

SEQ ID NO: 23124 - RNA, 20 nt, Artificial Sequence
  HTT spacer sequence GTCN PAM
cuuguuauugucaucauugu

SEQ ID NO: 23125 - RNA, 20 nt, Artificial Sequence
  HTT spacer sequence GTCN PAM
ucauugucaagccuugagug

SEQ ID NO: 23126 - RNA, 20 nt, Artificial Sequence
  HTT spacer sequence GTCN PAM
agccuugaguguugcuuccu

SEQ ID NO: 23127 - RNA, 20 nt, Artificial Sequence
  HTT spacer sequence GTCN PAM
caucacaucacucuucacag

SEQ ID NO: 23128 - RNA, 20 nt, Artificial Sequence
  HTT spacer sequence GTCN PAM
auucauucucucccaguggc

SEQ ID NO: 23129 - RNA, 20 nt, Artificial Sequence
  HTT spacer sequence GTCN PAM
ccuuuacucucaccugaauc

SEQ ID NO: 23130 - RNA, 20 nt, Artificial Sequence
  HTT spacer sequence GTCN PAM
gcgucaccuuuacucucacc

SEQ ID NO: 23131 - RNA, 20 nt, Artificial Sequence
  HTT spacer sequence GTCN PAM
ucugccaucacuucucacac

SEQ ID NO: 23132 - RNA, 20 nt, Artificial Sequence
  HTT spacer sequence GTCN PAM
gauucaggauggauccugaa

SEQ ID NO: 23133 - RNA, 20 nt, Artificial Sequence
  HTT spacer sequence GTCN PAM
ucuccaccaccugccuucag

SEQ ID NO: 23134 - RNA, 20 nt, Artificial Sequence
  HTT spacer sequence GTCN PAM
gccugaagucuucuccacca

SEQ ID NO: 23135 - RNA, 20 nt, Artificial Sequence
  HTT spacer sequence GTCN PAM
uugcaguggggaggacagca

SEQ ID NO: 23136 - RNA, 20 nt, Artificial Sequence
  HTT spacer sequence GTCN PAM
uccccacugcaaggacuugg

SEQ ID NO: 23137 - RNA, 20 nt, Artificial Sequence
  HTT spacer sequence GTCN PAM
cuggaggaacugcccacaca

SEQ ID NO: 23138 - RNA, 20 nt, Artificial Sequence
  HTT spacer sequence GTCN PAM
guggccagugcagcacagcu

SEQ ID NO: 23139 - RNA, 20 nt, Artificial Sequence
  HTT spacer sequence GTCN PAM
ccccagcugugcugcacugg

SEQ ID NO: 23140 - RNA, 20 nt, Artificial Sequence
  HTT spacer sequence GTCN PAM
cuuauggagcuucuuuuucu

SEQ ID NO: 23141 - RNA, 20 nt, Artificial Sequence
  HTT spacer sequence GTCN PAM
gccccuaguggggagcaaag

SEQ ID NO: 23142 - RNA, 20 nt, Artificial Sequence
  HTT spacer sequence GTCN PAM
gcaugggcucuugaugcugu

SEQ ID NO: 23143 - RNA, 20 nt, Artificial Sequence
  HTT spacer sequence GTCN PAM
agguguggcagaagcccagc

SEQ ID NO: 23144 - RNA, 20 nt, Artificial Sequence
  HTT spacer sequence GTCN PAM
agcagcuagagagaggccgg

SEQ ID NO: 23145 - RNA, 20 nt, Artificial Sequence
  HTT spacer sequence GTCN PAM
cucccuggcaugcagcccag

SEQ ID NO: 23146 - RNA, 20 nt, Artificial Sequence
  HTT spacer sequence GTCN PAM
ucuagucacucccuggcaug

SEQ ID NO: 23147 - RNA, 20 nt, Artificial Sequence
  HTT spacer sequence GTCN PAM
guccucuagucacucccugg

SEQ ID NO: 23148 - RNA, 20 nt, Artificial Sequence
  HTT spacer sequence GTCN PAM
agcccauggucuguccucua

SEQ ID NO: 23149 - RNA, 20 nt, Artificial Sequence
  HTT spacer sequence GTCN PAM
acuggagccagcgucgagcc

SEQ ID NO: 23150 - RNA, 20 nt, Artificial Sequence
  HTT spacer sequence GTCN PAM
auuuccucguccacuggagc

SEQ ID NO: 23151 - RNA, 20 nt, Artificial Sequence
  HTT spacer sequence GTCN PAM
aaguugggaguccauacacc

SEQ ID NO: 23152 - RNA, 20 nt, Artificial Sequence
  HTT spacer sequence GTCN PAM
auacaccuccaggccagagu

SEQ ID NO: 23153 - RNA, 20 nt, Artificial Sequence
  HTT spacer sequence GTCN PAM
cucucaucuuucuaacucug

SEQ ID NO: 23154 - RNA, 20 nt, Artificial Sequence
  HTT spacer sequence GTCN PAM
gcuccacuccaagcagcuuc

SEQ ID NO: 23155 - RNA, 20 nt, Artificial Sequence
  HTT spacer sequence GTCN PAM
ggggugugaccagggagaga

SEQ ID NO: 23156 - RNA, 20 nt, Artificial Sequence
  HTT spacer sequence GTCN PAM
caccccagacucuuggccag

SEQ ID NO: 23157 - RNA, 20 nt, Artificial Sequence
  HTT spacer sequence GTCN PAM
cuggggggauggaggaugaa

SEQ ID NO: 23158 - RNA, 20 nt, Artificial Sequence
  HTT spacer sequence GTCN PAM
cuggagaagagaaggccaca

SEQ ID NO: 23159 - RNA, 20 nt, Artificial Sequence
  HTT spacer sequence GTCN PAM
uguggccuucucuucuccag

SEQ ID NO: 23160 - RNA, 20 nt, Artificial Sequence
  HTT spacer sequence GTCN PAM
guuacccaggcacagcugcu

SEQ ID NO: 23161 - RNA, 20 nt, Artificial Sequence
  HTT spacer sequence GTCN PAM
uuuucauguguuuccauaua

SEQ ID NO: 23162 - RNA, 20 nt, Artificial Sequence
  HTT spacer sequence GTCN PAM
uggagccaggggucagccug

SEQ ID NO: 23163 - RNA, 20 nt, Artificial Sequence
  HTT spacer sequence GTCN PAM
gccuggaguucucccggcua

SEQ ID NO: 23164 - RNA, 20 nt, Artificial Sequence
  HTT spacer sequence GTCN PAM
gcucuaagcagagugaggua

SEQ ID NO: 23165 - RNA, 20 nt, Artificial Sequence
  HTT spacer sequence GTCN PAM
uccucccacaggacacugac

SEQ ID NO: 23166 - RNA, 20 nt, Artificial Sequence
  HTT spacer sequence GTCN PAM
ugugggaggaagacuccauu

SEQ ID NO: 23167 - RNA, 20 nt, Artificial Sequence
  HTT spacer sequence GTCN PAM
guguccugugggaggaagac

SEQ ID NO: 23168 - RNA, 20 nt, Artificial Sequence
  HTT spacer sequence GTCN PAM
gccccuaagagcucacaguu

SEQ ID NO: 23169 - RNA, 20 nt, Artificial Sequence
  HTT spacer sequence GTCN PAM
uuucuguuuguuuuaggccu

SEQ ID NO: 23170 - RNA, 20 nt, Artificial Sequence
  HTT spacer sequence GTCN PAM
aggcagguggaucaugaggu

SEQ ID NO: 23171 - RNA, 20 nt, Artificial Sequence
  HTT spacer sequence GTCN PAM
ggaguuugagaccagccugg

SEQ ID NO: 23172 - RNA, 20 nt, Artificial Sequence
  HTT spacer sequence GTCN PAM
caaacuccugaccucaugau

SEQ ID NO: 23173 - RNA, 20 nt, Artificial Sequence
  HTT spacer sequence GTCN PAM
ccaggcuggagugcaguggc

SEQ ID NO: 23174 - RNA, 20 nt, Artificial Sequence
  HTT spacer sequence GTCN PAM
ugcucugucgccaggcugga

SEQ ID NO: 23175 - RNA, 20 nt, Artificial Sequence
  HTT spacer sequence GTCN PAM
caaaaaagaaaaaagaaaag

SEQ ID NO: 23176 - RNA, 20 nt, Artificial Sequence
  HTT spacer sequence GTCN PAM
uaaguggauagaaacaaagg

SEQ ID NO: 23177 - RNA, 20 nt, Artificial Sequence
  HTT spacer sequence GTCN PAM
gagugagggcucugugugag

SEQ ID NO: 23178 - RNA, 20 nt, Artificial Sequence
  HTT spacer sequence GTCN PAM
cagcucccauuacaggauca

SEQ ID NO: 23179 - RNA, 20 nt, Artificial Sequence
  HTT spacer sequence GTCN PAM
uuaacccauagaacccauuc

SEQ ID NO: 23180 - RNA, 20 nt, Artificial Sequence
  HTT spacer sequence GTCN PAM
cacagcaacugcuggcagcu

SEQ ID NO: 23181 - RNA, 20 nt, Artificial Sequence
  HTT spacer sequence GTCN PAM
agcugccagcaguugcugug

SEQ ID NO: 23182 - RNA, 20 nt, Artificial Sequence
  HTT spacer sequence GTCN PAM
aaaagcuggccucaggucca

SEQ ID NO: 23183 - RNA, 20 nt, Artificial Sequence
  HTT spacer sequence GTCN PAM
ggccaucugucuuagucccu

SEQ ID NO: 23184 - RNA, 20 nt, Artificial Sequence
  HTT spacer sequence GTCN PAM
uagucccuuugggcugcuau

SEQ ID NO: 23185 - RNA, 20 nt, Artificial Sequence
  HTT spacer sequence GTCN PAM
cuuugggcugcuaugacaga

SEQ ID NO: 23186 - RNA, 20 nt, Artificial Sequence
  HTT spacer sequence GTCN PAM
uagcagcccaaagggacuaa

SEQ ID NO: 23187 - RNA, 20 nt, Artificial Sequence
  HTT spacer sequence GTCN PAM
aagggauucugucauagcag

SEQ ID NO: 23188 - RNA, 20 nt, Artificial Sequence
  HTT spacer sequence GTCN PAM
ggaggcuggaaguccuagau

SEQ ID NO: 23189 - RNA, 20 nt, Artificial Sequence
  HTT spacer sequence GTCN PAM
uagaucaagaugccugcaga

SEQ ID NO: 23190 - RNA, 20 nt, Artificial Sequence
  HTT spacer sequence GTCN PAM
cuagcuccuuggcucaagug

SEQ ID NO: 23191 - RNA, 20 nt, Artificial Sequence
  HTT spacer sequence GTCN PAM
auauuuuaaaagaaagaaag

SEQ ID NO: 23192 - RNA, 20 nt, Artificial Sequence
  HTT spacer sequence GTCN PAM
ucugcccugugagggugcag

SEQ ID NO: 23193 - RNA, 20 nt, Artificial Sequence
  HTT spacer sequence GTCN PAM
ugaaggcucugcccucguga

SEQ ID NO: 23194 - RNA, 20 nt, Artificial Sequence
  HTT spacer sequence GTCN PAM
caccucucaauacuauugca

SEQ ID NO: 23195 - RNA, 20 nt, Artificial Sequence
  HTT spacer sequence GTCN PAM
cugagaugcagaaaugguau

SEQ ID NO: 23196 - RNA, 20 nt, Artificial Sequence
  HTT spacer sequence GTCN PAM
caaagaaacaacaacaaaua

SEQ ID NO: 23197 - RNA, 20 nt, Artificial Sequence
  HTT spacer sequence GTCN PAM
caagaaacagaucuggccca

SEQ ID NO: 23198 - RNA, 20 nt, Artificial Sequence
  HTT spacer sequence GTCN PAM
caccacuguacuccaaccug

SEQ ID NO: 23199 - RNA, 20 nt, Artificial Sequence
  HTT spacer sequence GTCN PAM
cagcuacucaggagccugag

SEQ ID NO: 23200 - RNA, 20 nt, Artificial Sequence
  HTT spacer sequence GTCN PAM
ggcuaauuuuuguauuuuua

SEQ ID NO: 23201 - RNA, 20 nt, Artificial Sequence
  HTT spacer sequence GTCN PAM
cuacuaaaaauacaaaaauu

SEQ ID NO: 23202 - RNA, 20 nt, Artificial Sequence
  HTT spacer sequence GTCN PAM
ugaucuccugaccucgugau

SEQ ID NO: 23203 - RNA, 20 nt, Artificial Sequence
  HTT spacer sequence GTCN PAM
ggagaucaagaccauccugg

SEQ ID NO: 23204 - RNA, 20 nt, Artificial Sequence
  HTT spacer sequence GTCN PAM
ucacauccguuuuaaauuaa

SEQ ID NO: 23205 - RNA, 20 nt, Artificial Sequence
  HTT spacer sequence GTCN PAM
cacagccuuagcuucaggaa

SEQ ID NO: 23206 - RNA, 20 nt, Artificial Sequence
  HTT spacer sequence GTCN PAM
agcaggacagccuggcaaua

SEQ ID NO: 23207 - RNA, 20 nt, Artificial Sequence
  HTT spacer sequence GTCN PAM
ugcuagacucaaagcuuccu

SEQ ID NO: 23208 - RNA, 20 nt, Artificial Sequence
  HTT spacer sequence GTCN PAM
aaaugacucauucucagcaa

SEQ ID NO: 23209 - RNA, 20 nt, Artificial Sequence
  HTT spacer sequence GTCN PAM
uuuggacgcgccauuauugc

SEQ ID NO: 23210 - RNA, 20 nt, Artificial Sequence
  HTT spacer sequence GTCN PAM
ucgaggagagguggaggauc

SEQ ID NO: 23211 - RNA, 20 nt, Artificial Sequence
  HTT spacer sequence GTCN PAM
gcaagccgaagagcuuugua

SEQ ID NO: 23212 - RNA, 20 nt, Artificial Sequence
  HTT spacer sequence GTCN PAM
acaaagcucuucggcuugcu

SEQ ID NO: 23213 - RNA, 20 nt, Artificial Sequence
  HTT spacer sequence GTCN PAM
gcgcuucuaucucccaccgc

SEQ ID NO: 23214 - RNA, 20 nt, Artificial Sequence
  HTT spacer sequence GTCN PAM
uugggacuuugaguuggcca

SEQ ID NO: 23215 - RNA, 20 nt, Artificial Sequence
  HTT spacer sequence GTCN PAM
caaagaccagaaagcauucu

SEQ ID NO: 23216 - RNA, 20 nt, Artificial Sequence
  HTT spacer sequence GTCN PAM
agacuuugcaggucuauuac

SEQ ID NO: 23217 - RNA, 20 nt, Artificial Sequence
  HTT spacer sequence GTCN PAM
agacgcuguuuaccaucugg

SEQ ID NO: 23218 - RNA, 20 nt, Artificial Sequence
  HTT spacer sequence GTCN PAM
auuacagcgauucaacucug

SEQ ID NO: 23219 - RNA, 20 nt, Artificial Sequence
  HTT spacer sequence GTCN PAM
auaaagccuuguuuccaaaa

SEQ ID NO: 23220 - RNA, 20 nt, Artificial Sequence
  HTT spacer sequence GTCN PAM
agccaccacaggcaccagcu

SEQ ID NO: 23221 - RNA, 20 nt, Artificial Sequence
  HTT spacer sequence GTCN PAM
aggucacguuucaggggucc

SEQ ID NO: 23222 - RNA, 20 nt, Artificial Sequence
  HTT spacer sequence GTCN PAM
cguuucagggguccaggucu

SEQ ID NO: 23223 - RNA, 20 nt, Artificial Sequence
  HTT spacer sequence GTCN PAM
aggucuuucauguguugcuu

SEQ ID NO: 23224 - RNA, 20 nt, Artificial Sequence
  HTT spacer sequence GTCN PAM
uucauguguugcuuuugagc

SEQ ID NO: 23225 - RNA, 20 nt, Artificial Sequence
  HTT spacer sequence GTCN PAM
uuagugguauuucugaaauu

SEQ ID NO: 23226 - RNA, 20 nt, Artificial Sequence
  HTT spacer sequence GTCN PAM
auuucagaaauaccacuaag

SEQ ID NO: 23227 - RNA, 20 nt, Artificial Sequence
  HTT spacer sequence GTCN PAM
gcuauguuauuccuuaaguu

SEQ ID NO: 23228 - RNA, 20 nt, Artificial Sequence
  HTT spacer sequence GTCN PAM
uauaauuuaaugaguaaagu

SEQ ID NO: 23229 - RNA, 20 nt, Artificial Sequence
  HTT spacer sequence GTCN PAM
gaguuccugaggucugcuug

SEQ ID NO: 23230 - RNA, 20 nt, Artificial Sequence
  HTT spacer sequence GTCN PAM
gcuugaugcuuggaaauuau

SEQ ID NO: 23231 - RNA, 20 nt, Artificial Sequence
  HTT spacer sequence GTCN PAM
ugagccaccgcgcccagcug

SEQ ID NO: 23232 - RNA, 20 nt, Artificial Sequence
  HTT spacer sequence GTCN PAM
aggcggguggaucacgaggu

SEQ ID NO: 23233 - RNA, 20 nt, Artificial Sequence
  HTT spacer sequence GTCN PAM
ggagauggagaccacgguga

SEQ ID NO: 23234 - RNA, 20 nt, Artificial Sequence
  HTT spacer sequence GTCN PAM
ccaucuccugaccucgugau

SEQ ID NO: 23235 - RNA, 20 nt, Artificial Sequence
  HTT spacer sequence GTCN PAM
ccacuaaaaauacaaaaaau

SEQ ID NO: 23236 - RNA, 20 nt, Artificial Sequence
  HTT spacer sequence GTCN PAM
cagcuacucgggaggcugag

SEQ ID NO: 23237 - RNA, 20 nt, Artificial Sequence
  HTT spacer sequence GTCN PAM
cccaggcuggagugcagugg

SEQ ID NO: 23238 - RNA, 20 nt, Artificial Sequence
  HTT spacer sequence GTCN PAM
cguucugucacccaggcugg

SEQ ID NO: 23239 - RNA, 20 nt, Artificial Sequence
  HTT spacer sequence GTCN PAM
uuugguuauuauuaugcagg

SEQ ID NO: 23240 - RNA, 20 nt, Artificial Sequence
  HTT spacer sequence GTCN PAM
uugaacacggggugcugcuu

SEQ ID NO: 23241 - RNA, 20 nt, Artificial Sequence
  HTT spacer sequence GTCN PAM
ugauguaagugcauugccag

SEQ ID NO: 23242 - RNA, 20 nt, Artificial Sequence
  HTT spacer sequence GTCN PAM
uggcaaugcacuuacaucag

SEQ ID NO: 23243 - RNA, 20 nt, Artificial Sequence
  HTT spacer sequence GTCN PAM
cacuguguugcccaggcugg

SEQ ID NO: 23244 - RNA, 20 nt, Artificial Sequence
  HTT spacer sequence GTCN PAM
ugcacuccuggccucaagug

SEQ ID NO: 23245 - RNA, 20 nt, Artificial Sequence
  HTT spacer sequence GTCN PAM
uccaccuuggccucccacag

SEQ ID NO: 23246 - RNA, 20 nt, Artificial Sequence
  HTT spacer sequence GTCN PAM
uaccugguucuucuucccuc

SEQ ID NO: 23247 - RNA, 20 nt, Artificial Sequence
  HTT spacer sequence GTCN PAM
ccccagugugcuuuggccac

SEQ ID NO: 23248 - RNA, 20 nt, Artificial Sequence
  HTT spacer sequence GTCN PAM
gugaggggcccagugagugg

SEQ ID NO: 23249 - RNA, 20 nt, Artificial Sequence
  HTT spacer sequence GTCN PAM
cugucagccucacugcuggg

SEQ ID NO: 23250 - RNA, 20 nt, Artificial Sequence
  HTT spacer sequence GTCN PAM
gccucacugcugggggagcc

SEQ ID NO: 23251 - RNA, 20 nt, Artificial Sequence
  HTT spacer sequence GTCN PAM
cagcuaccuggggggcuccc

SEQ ID NO: 23252 - RNA, 20 nt, Artificial Sequence
  HTT spacer sequence GTCN PAM
cuagaaaagaagugaaaaug

SEQ ID NO: 23253 - RNA, 20 nt, Artificial Sequence
  HTT spacer sequence GTCN PAM
cccuauguugcccaggcuac

SEQ ID NO: 23254 - RNA, 20 nt, Artificial Sequence
  HTT spacer sequence GTCN PAM
aggcaggaggaucacuuggg

SEQ ID NO: 23255 - RNA, 20 nt, Artificial Sequence
  HTT spacer sequence GTCN PAM
ccuuucuggucucagggcug

SEQ ID NO: 23256 - RNA, 20 nt, Artificial Sequence
  HTT spacer sequence GTCN PAM
cagggcuggcuuucucucuc

SEQ ID NO: 23257 - RNA, 20 nt, Artificial Sequence
  HTT spacer sequence GTCN PAM
ggaacgcguguccccacucu

SEQ ID NO: 23258 - RNA, 20 nt, Artificial Sequence
  HTT spacer sequence GTCN PAM
ccacucugcuucucaugagg

SEQ ID NO: 23259 - RNA, 20 nt, Artificial Sequence
  HTT spacer sequence GTCN PAM
ugggacuguggccuggcccc

SEQ ID NO: 23260 - RNA, 20 nt, Artificial Sequence
  HTT spacer sequence GTCN PAM
caggaccucaugagaagcag

SEQ ID NO: 23261 - RNA, 20 nt, Artificial Sequence
  HTT spacer sequence GTCN PAM
ucaguacggggccaggccac

SEQ ID NO: 23262 - RNA, 20 nt, Artificial Sequence
  HTT spacer sequence GTCN PAM
cugugccuccuugugagugu

SEQ ID NO: 23263 - RNA, 20 nt, Artificial Sequence
  HTT spacer sequence GTCN PAM
caacagcacacucacaagga

SEQ ID NO: 23264 - RNA, 20 nt, Artificial Sequence
  HTT spacer sequence GTCN PAM
agaggaaggugucccaacag

SEQ ID NO: 23265 - RNA, 20 nt, Artificial Sequence
  HTT spacer sequence GTCN PAM
ccgaggggcggggccugccg

SEQ ID NO: 23266 - RNA, 20 nt, Artificial Sequence
  HTT spacer sequence GTCN PAM
acuuccgccuccccaccuug

SEQ ID NO: 23267 - RNA, 20 nt, Artificial Sequence
  HTT spacer sequence GTCN PAM
gcacagcuguuagaguagcu

SEQ ID NO: 23268 - RNA, 20 nt, Artificial Sequence
  HTT spacer sequence GTCN PAM
ugggugaaaaguuucucagg

SEQ ID NO: 23269 - RNA, 20 nt, Artificial Sequence
  HTT spacer sequence GTCN PAM
ugagaaacuuuucacccagg

SEQ ID NO: 23270 - RNA, 20 nt, Artificial Sequence
  HTT spacer sequence GTCN PAM
cacagcugccgacuuccgug

SEQ ID NO: 23271 - RNA, 20 nt, Artificial Sequence
  HTT spacer sequence GTCN PAM
gcagcugugggacccucauc

SEQ ID NO: 23272 - RNA, 20 nt, Artificial Sequence
  HTT spacer sequence GTCN PAM
ccaccugccgccaguacagu

SEQ ID NO: 23273 - RNA, 20 nt, Artificial Sequence
  HTT spacer sequence GTCN PAM
gggucuccaccugccgccag

SEQ ID NO: 23274 - RNA, 20 nt, Artificial Sequence
  HTT spacer sequence GTCN PAM
ggcaggcaggagggagugcc

SEQ ID NO: 23275 - RNA, 20 nt, Artificial Sequence
  HTT spacer sequence GTCN PAM
ucagaggcagagggucaggc

SEQ ID NO: 23276 - RNA, 20 nt, Artificial Sequence
  HTT spacer sequence GTCN PAM
gcagcuccuaucccggcacu

SEQ ID NO: 23277 - RNA, 20 nt, Artificial Sequence
  HTT spacer sequence GTCN PAM
cagaggagggaccugcugau

SEQ ID NO: 23278 - RNA, 20 nt, Artificial Sequence
  HTT spacer sequence GTCN PAM
cuccucugggacaggaaccc

SEQ ID NO: 23279 - RNA, 20 nt, Artificial Sequence
  HTT spacer sequence GTCN PAM
cuugcagccuuggagaccac

SEQ ID NO: 23280 - RNA, 20 nt, Artificial Sequence
  HTT spacer sequence GTCN PAM
ccaaggcugcaagggaccuc

SEQ ID NO: 23281 - RNA, 20 nt, Artificial Sequence
  HTT spacer sequence GTCN PAM
acugaguggucuccaaggcu

SEQ ID NO: 23282 - RNA, 20 nt, Artificial Sequence
  HTT spacer sequence GTCN PAM
cuaagggaucccaccgcugg

SEQ ID NO: 23283 - RNA, 20 nt, Artificial Sequence
  HTT spacer sequence GTCN PAM
cuguucacacuucuccgguu

SEQ ID NO: 23284 - RNA, 20 nt, Artificial Sequence
  HTT spacer sequence GTCN PAM
acccugcccugcaucccuga

SEQ ID NO: 23285 - RNA, 20 nt, Artificial Sequence
  HTT spacer sequence GTCN PAM
gggaugcagggcagggugga

SEQ ID NO: 23286 - RNA, 20 nt, Artificial Sequence
  HTT spacer sequence GTCN PAM
cuugcaugcccuggcucucu

SEQ ID NO: 23287 - RNA, 20 nt, Artificial Sequence
  HTT spacer sequence GTCN PAM
gugccaggucccuugcaugc

SEQ ID NO: 23288 - RNA, 20 nt, Artificial Sequence
  HTT spacer sequence GTCN PAM
ccaauuuugugguacugucu

SEQ ID NO: 23289 - RNA, 20 nt, Artificial Sequence
  HTT spacer sequence GTCN PAM
ucugaagaggugguucgcca

SEQ ID NO: 23290 - RNA, 20 nt, Artificial Sequence
  HTT spacer sequence GTCN PAM
ccauucuuuugccaggcccc

SEQ ID NO: 23291 - RNA, 20 nt, Artificial Sequence
  HTT spacer sequence GTCN PAM
guuugcugggcguuucauuc

SEQ ID NO: 23292 - RNA, 20 nt, Artificial Sequence
  HTT spacer sequence GTCN PAM
ucucagaggcugccccuguu

SEQ ID NO: 23293 - RNA, 20 nt, Artificial Sequence
  HTT spacer sequence GTCN PAM
uuacaguaaacggcaugagg

SEQ ID NO: 23294 - RNA, 20 nt, Artificial Sequence
  HTT spacer sequence GTCN PAM
uggauaucgagcaguucucg

SEQ ID NO: 23295 - RNA, 20 nt, Artificial Sequence
  HTT spacer sequence GTCN PAM
agguagaucccuuucaccac

SEQ ID NO: 23296 - RNA, 20 nt, Artificial Sequence
  HTT spacer sequence GTCN PAM
ucaucugcgguguccaggua

SEQ ID NO: 23297 - RNA, 20 nt, Artificial Sequence
  HTT spacer sequence GTCN PAM
ccauccccuggcagaaugag

SEQ ID NO: 23298 - RNA, 20 nt, Artificial Sequence
  HTT spacer sequence GTCN PAM
cuguuggaacuaacguaaag

SEQ ID NO: 23299 - RNA, 20 nt, Artificial Sequence
  HTT spacer sequence GTCN PAM
gugugugugugugugucugu

SEQ ID NO: 23300 - RNA, 20 nt, Artificial Sequence
  HTT spacer sequence GTCN PAM
guguguauuugggagauaaa

SEQ ID NO: 23301 - RNA, 20 nt, Artificial Sequence
  HTT spacer sequence GTCN PAM
uauauaauuuuaucucccaa

SEQ ID NO: 23302 - RNA, 20 nt, Artificial Sequence
  HTT spacer sequence GTCN PAM
ggaguucgagaccagccugg

SEQ ID NO: 23303 - RNA, 20 nt, Artificial Sequence
  HTT spacer sequence GTCN PAM
cgaacuccugaccucaugau

SEQ ID NO: 23304 - RNA, 20 nt, Artificial Sequence
  HTT spacer sequence GTCN PAM
cuacuaaaaguacaaaaauu

SEQ ID NO: 23305 - RNA, 20 nt, Artificial Sequence
  HTT spacer sequence GTCN PAM
cagcuaguagggaugcugag

SEQ ID NO: 23306 - RNA, 20 nt, Artificial Sequence
  HTT spacer sequence GTCN PAM
cccaagguggaguacagugg

SEQ ID NO: 23307 - RNA, 20 nt, Artificial Sequence
  HTT spacer sequence GTCN PAM
cguucugucgcccaaggugg

SEQ ID NO: 23308 - RNA, 20 nt, Artificial Sequence
  HTT spacer sequence GTCN PAM
cacccaaaaaaaaaaaaaaa

SEQ ID NO: 23309 - RNA, 20 nt, Artificial Sequence
  HTT spacer sequence GTCN PAM
uauacaaucuuuuuuuuuuu

SEQ ID NO: 23310 - RNA, 20 nt, Artificial Sequence
  HTT spacer sequence GTCN PAM
aaagucuuauacaaucuuuu

SEQ ID NO: 23311 - RNA, 20 nt, Artificial Sequence
  HTT spacer sequence GTCN PAM
uguggucaaaagucuuauac

SEQ ID NO: 23312 - RNA, 20 nt, Artificial Sequence
  HTT spacer sequence GTCN PAM
aguccuguggucaaaagucu

SEQ ID NO: 23313 - RNA, 20 nt, Artificial Sequence
  HTT spacer sequence GTCN PAM
uuggcuugcccauggucuag

SEQ ID NO: 23314 - RNA, 20 nt, Artificial Sequence
  HTT spacer sequence GTCN PAM
agaagcacagcggcuguccc

SEQ ID NO: 23315 - RNA, 20 nt, Artificial Sequence
  HTT spacer sequence GTCN PAM
cuggucccaaugacaggaag

SEQ ID NO: 23316 - RNA, 20 nt, Artificial Sequence
  HTT spacer sequence GTCN PAM
caaugacaggaaguggacag

SEQ ID NO: 23317 - RNA, 20 nt, Artificial Sequence
  HTT spacer sequence GTCN PAM
uugggaccagggacagccgc

SEQ ID NO: 23318 - RNA, 20 nt, Artificial Sequence
  HTT spacer sequence GTCN PAM
acuuccugucauugggacca

SEQ ID NO: 23319 - RNA, 20 nt, Artificial Sequence
  HTT spacer sequence GTCN PAM
gaugggagcuugccugccac

SEQ ID NO: 23320 - RNA, 20 nt, Artificial Sequence
  HTT spacer sequence GTCN PAM
cugaguguacucccaaagca

SEQ ID NO: 23321 - RNA, 20 nt, Artificial Sequence
  HTT spacer sequence GTCN PAM
ccucuccccuugucucugag

SEQ ID NO: 23322 - RNA, 20 nt, Artificial Sequence
  HTT spacer sequence GTCN PAM
ggaagcagggaaggaggaac

SEQ ID NO: 23323 - RNA, 20 nt, Artificial Sequence
  HTT spacer sequence GTCN PAM
cccagugccagcagcuccug

SEQ ID NO: 23324 - RNA, 20 nt, Artificial Sequence
  HTT spacer sequence GTCN PAM
gugggugucucccagugcca

SEQ ID NO: 23325 - RNA, 20 nt, Artificial Sequence
  HTT spacer sequence GTCN PAM
uguuauucugugcaugcaga

SEQ ID NO: 23326 - RNA, 20 nt, Artificial Sequence
  HTT spacer sequence GTCN PAM
uugaaacacccagauucgau

SEQ ID NO: 23327 - RNA, 20 nt, Artificial Sequence
  HTT spacer sequence GTCN PAM
agaucuaauggcaaagcuuc

SEQ ID NO: 23328 - RNA, 20 nt, Artificial Sequence
  HTT spacer sequence GTCN PAM
ggaaaccgggguauguaugu

SEQ ID NO: 23329 - RNA, 20 nt, Artificial Sequence
  HTT spacer sequence GTCN PAM
auagaagaagccucuguuug

SEQ ID NO: 23330 - RNA, 20 nt, Artificial Sequence
  HTT spacer sequence GTCN PAM
uuuuaccccucuucugaaga

SEQ ID NO: 23331 - RNA, 20 nt, Artificial Sequence
  HTT spacer sequence GTCN PAM
guauguuuuuuuuuuuuuca

SEQ ID NO: 23332 - RNA, 20 nt, Artificial Sequence
  HTT spacer sequence GTCN PAM
gagagccacauggugcuagg

SEQ ID NO: 23333 - RNA, 20 nt, Artificial Sequence
  HTT spacer sequence GTCN PAM
ucaucccagcaacaaaccuc

SEQ ID NO: 23334 - RNA, 20 nt, Artificial Sequence
  HTT spacer sequence GTCN PAM
uguuuuggaucagaacaguc

SEQ ID NO: 23335 - RNA, 20 nt, Artificial Sequence
  HTT spacer sequence GTCN PAM
cugacaaaauaguuuacacu

SEQ ID NO: 23336 - RNA, 20 nt, Artificial Sequence
  HTT spacer sequence GTCN PAM
gcgacacgggaaccuguuug

SEQ ID NO: 23337 - RNA, 20 nt, Artificial Sequence
  HTT spacer sequence GTCN PAM
gauggcacucacagugcauc

SEQ ID NO: 23338 - RNA, 20 nt, Artificial Sequence
  HTT spacer sequence GTCN PAM
aagagccagagcagggagag

SEQ ID NO: 23339 - RNA, 20 nt, Artificial Sequence
  HTT spacer sequence GTCN PAM
ggaguuugagaccagccugg

SEQ ID NO: 23340 - RNA, 20 nt, Artificial Sequence
  HTT spacer sequence GTCN PAM
caaacuccugaccucaggug

SEQ ID NO: 23341 - RNA, 20 nt, Artificial Sequence
  HTT spacer sequence GTCN PAM
cagcuacuugggaggcugag

SEQ ID NO: 23342 - RNA, 20 nt, Artificial Sequence
  HTT spacer sequence GTCN PAM
ugcgcuguugcccaggcugg

SEQ ID NO: 23343 - RNA, 20 nt, Artificial Sequence
  HTT spacer sequence GTCN PAM
uuccaaaggauuccauuuuu

SEQ ID NO: 23344 - RNA, 20 nt, Artificial Sequence
  HTT spacer sequence GTCN PAM
acauuuaaugcuauuacaga

SEQ ID NO: 23345 - RNA, 20 nt, Artificial Sequence
  HTT spacer sequence GTCN PAM
cuccuuggauucgugggcca

SEQ ID NO: 23346 - RNA, 20 nt, Artificial Sequence
  HTT spacer sequence GTCN PAM
ggaguucaagaccagcuuag

SEQ ID NO: 23347 - RNA, 20 nt, Artificial Sequence
  HTT spacer sequence GTCN PAM
ugaacuccugaccucaggug

SEQ ID NO: 23348 - RNA, 20 nt, Artificial Sequence
  HTT spacer sequence GTCN PAM
ugguggcaugugccuguaau

SEQ ID NO: 23349 - RNA, 20 nt, Artificial Sequence
  HTT spacer sequence GTCN PAM
gaggcaggagaaucgcuuga

SEQ ID NO: 23350 - RNA, 20 nt, Artificial Sequence
  HTT spacer sequence GTCN PAM
cggcucccuguaaccuccgc

SEQ ID NO: 23351 - RNA, 20 nt, Artificial Sequence
  HTT spacer sequence GTCN PAM
cccaggcuggagcgcaaugg

SEQ ID NO: 23352 - RNA, 20 nt, Artificial Sequence
  HTT spacer sequence GTCN PAM
uaaaaaaaaaaaaaaaaaaa

SEQ ID NO: 23353 - RNA, 20 nt, Artificial Sequence
  HTT spacer sequence GTCN PAM
uuccucugagaacuaagggu

SEQ ID NO: 23354 - RNA, 20 nt, Artificial Sequence
  HTT spacer sequence GTCN PAM
gggagagccauuuuguuagu

SEQ ID NO: 23355 - RNA, 20 nt, Artificial Sequence
  HTT spacer sequence GTCN PAM
caguguccacacuuggagau

SEQ ID NO: 23356 - RNA, 20 nt, Artificial Sequence
  HTT spacer sequence GTCN PAM
acacuuggagauggaaccca

SEQ ID NO: 23357 - RNA, 20 nt, Artificial Sequence
  HTT spacer sequence GTCN PAM
cuggcugccuaagaagcagu

SEQ ID NO: 23358 - RNA, 20 nt, Artificial Sequence
  HTT spacer sequence GTCN PAM
cagggucucuggcugccuaa

SEQ ID NO: 23359 - RNA, 20 nt, Artificial Sequence
  HTT spacer sequence GTCN PAM
cugcuaaaaauacaaaacuu

SEQ ID NO: 23360 - RNA, 20 nt, Artificial Sequence
  HTT spacer sequence GTCN PAM
uagcuacucaggaggcugag

SEQ ID NO: 23361 - RNA, 20 nt, Artificial Sequence
  HTT spacer sequence GTCN PAM
cccaggcuggagugcaaugg

SEQ ID NO: 23362 - RNA, 20 nt, Artificial Sequence
  HTT spacer sequence GTCN PAM
cacucugucgcccaggcugg

SEQ ID NO: 23363 - RNA, 20 nt, Artificial Sequence
  HTT spacer sequence GTCN PAM
caaaaaauaaauaaauaaau

SEQ ID NO: 23364 - RNA, 20 nt, Artificial Sequence
  HTT spacer sequence GTCN PAM
gcacuuaaggaaagugaaac

SEQ ID NO: 23365 - RNA, 20 nt, Artificial Sequence
  HTT spacer sequence GTCN PAM
ggcagcccuacaacacacag

SEQ ID NO: 23366 - RNA, 20 nt, Artificial Sequence
  HTT spacer sequence GTCN PAM
ccagugagaaggaaguggaa

SEQ ID NO: 23367 - RNA, 20 nt, Artificial Sequence
  HTT spacer sequence GTCN PAM
gcaccggggugcucagcauu

SEQ ID NO: 23368 - RNA, 20 nt, Artificial Sequence
  HTT spacer sequence GTCN PAM
gcucugugguccgcaccggg

SEQ ID NO: 23369 - RNA, 20 nt, Artificial Sequence
  HTT spacer sequence GTCN PAM
cgucccaccuggaauuguaa

SEQ ID NO: 23370 - RNA, 20 nt, Artificial Sequence
  HTT spacer sequence GTCN PAM
caccuggaauuguaauaaau

SEQ ID NO: 23371 - RNA, 20 nt, Artificial Sequence
  HTT spacer sequence GTCN PAM
guacacucccaaggcauguu

SEQ ID NO: 23372 - RNA, 20 nt, Artificial Sequence
  HTT spacer sequence GTCN PAM
uuucacuaaagcuggauuga

SEQ ID NO: 23373 - RNA, 20 nt, Artificial Sequence
  HTT spacer sequence GTCN PAM
ggggccucagggguacucuu

SEQ ID NO: 23374 - RNA, 20 nt, Artificial Sequence
  HTT spacer sequence GTCN PAM
uccauucccaagcccccgcu

SEQ ID NO: 23375 - RNA, 20 nt, Artificial Sequence
  HTT spacer sequence GTCN PAM
ggggguggcgcgaggcacug

SEQ ID NO: 23376 - RNA, 20 nt, Artificial Sequence
  HTT spacer sequence GTCN PAM
caccacucggccagagaugu

SEQ ID NO: 23377 - RNA, 20 nt, Artificial Sequence
  HTT spacer sequence GTCN PAM
aggaagagagggggcggccg

SEQ ID NO: 23378 - RNA, 20 nt, Artificial Sequence
  HTT spacer sequence GTCN PAM
gacaguccgagcccguuggc

SEQ ID NO: 23379 - RNA, 20 nt, Artificial Sequence
  HTT spacer sequence GTCN PAM
gacacccgggcccuggggaa

SEQ ID NO: 23380 - RNA, 20 nt, Artificial Sequence
  HTT spacer sequence GTCN PAM
gagcccguuggcauuccugc

SEQ ID NO: 23381 - RNA, 20 nt, Artificial Sequence
  HTT spacer sequence GTCN PAM
cguugccuugugccccucac

SEQ ID NO: 23382 - RNA, 20 nt, Artificial Sequence
  HTT spacer sequence GTCN PAM
uggggagccgccccuuucaa

SEQ ID NO: 23383 - RNA, 20 nt, Artificial Sequence
  HTT spacer sequence GTCN PAM
gggccuggcggccagggcuc

SEQ ID NO: 23384 - RNA, 20 nt, Artificial Sequence
  HTT spacer sequence GTCN PAM
ccgcaugccgggcgcaccug

SEQ ID NO: 23385 - RNA, 20 nt, Artificial Sequence
  HTT spacer sequence GTCN PAM
acgucagggcccccgagagg

SEQ ID NO: 23386 - RNA, 20 nt, Artificial Sequence
  HTT spacer sequence GTCN PAM
gggcccccgagaggccggua

SEQ ID NO: 23387 - RNA, 20 nt, Artificial Sequence
  HTT spacer sequence GTCN PAM
gggaugaggagcccgcccuc

SEQ ID NO: 23388 - RNA, 20 nt, Artificial Sequence
  HTT spacer sequence GTCN PAM
ccccgcgggugagcacccca

SEQ ID NO: 23389 - RNA, 20 nt, Artificial Sequence
  HTT spacer sequence GTCN PAM
acacccuuccgcuacgcccu

SEQ ID NO: 23390 - RNA, 20 nt, Artificial Sequence
  HTT spacer sequence GTCN PAM
cccccugggaaaucuucaug

SEQ ID NO: 23391 - RNA, 20 nt, Artificial Sequence
  HTT spacer sequence GTCN PAM
cuccuguucgcuccccgccc

SEQ ID NO: 23392 - RNA, 20 nt, Artificial Sequence
  HTT spacer sequence GTCN PAM
gcucuggggccucagcccuc

SEQ ID NO: 23393 - RNA, 20 nt, Artificial Sequence
  HTT spacer sequence GTCN PAM
agugcugcccugcccugcgg

SEQ ID NO: 23394 - RNA, 20 nt, Artificial Sequence
  HTT spacer sequence GTCN PAM
gcuccucccugaaccagccc

SEQ ID NO: 23395 - RNA, 20 nt, Artificial Sequence
  HTT spacer sequence GTCN PAM
ccgucagcuccucccugaac

SEQ ID NO: 23396 - RNA, 20 nt, Artificial Sequence
  HTT spacer sequence GTCN PAM
gggcugccuggagccugcag

SEQ ID NO: 23397 - RNA, 20 nt, Artificial Sequence
  HTT spacer sequence GTCN PAM
ccgaggccugugcccuggcu

SEQ ID NO: 23398 - RNA, 20 nt, Artificial Sequence
  HTT spacer sequence GTCN PAM
gguucaaagucaccgaggcc

SEQ ID NO: 23399 - RNA, 20 nt, Artificial Sequence
  HTT spacer sequence GTCN PAM
cugucugguucaaagucacc

SEQ ID NO: 23400 - RNA, 20 nt, Artificial Sequence
  HTT spacer sequence GTCN PAM
gaugugucacugucugguuc

SEQ ID NO: 23401 - RNA, 20 nt, Artificial Sequence
  HTT spacer sequence GTCN PAM
cucaggcacugugguuccuc

SEQ ID NO: 23402 - RNA, 20 nt, Artificial Sequence
  HTT spacer sequence GTCN PAM
cuccugcugcucuugugaaa

SEQ ID NO: 23403 - RNA, 20 nt, Artificial Sequence
  HTT spacer sequence GTCN PAM
gccuggaagccuggucgcuc

SEQ ID NO: 23404 - RNA, 20 nt, Artificial Sequence
  HTT spacer sequence GTCN PAM
ugggaggaaaacaccagcgg

SEQ ID NO: 23405 - RNA, 20 nt, Artificial Sequence
  HTT spacer sequence GTCN PAM
ccaugagguugggagccuuc

SEQ ID NO: 23406 - RNA, 20 nt, Artificial Sequence
  HTT spacer sequence GTCN PAM
ccuuccccuuccccucguac

SEQ ID NO: 23407 - RNA, 20 nt, Artificial Sequence
  HTT spacer sequence GTCN PAM
ccaagauaacguccccuucc

SEQ ID NO: 23408 - RNA, 20 nt, Artificial Sequence
  HTT spacer sequence GTCN PAM
uuauucuuugggggaaugga

SEQ ID NO: 23409 - RNA, 20 nt, Artificial Sequence
  HTT spacer sequence GTCN PAM
cccgcuuccaaaaagccuua

SEQ ID NO: 23410 - RNA, 20 nt, Artificial Sequence
  HTT spacer sequence GTCN PAM
cgccgcggucacccgcuucc

SEQ ID NO: 23411 - RNA, 20 nt, Artificial Sequence
  HTT spacer sequence GTCN PAM
agagucccgccgcggucacc

SEQ ID NO: 23412 - RNA, 20 nt, Artificial Sequence
  HTT spacer sequence GTCN PAM
ucagcugcagaaugaagaug

SEQ ID NO: 23413 - RNA, 20 nt, Artificial Sequence
  HTT spacer sequence GTCN PAM
guaaaucauguagcacagug

SEQ ID NO: 23414 - RNA, 20 nt, Artificial Sequence
  HTT spacer sequence GTCN PAM
ccauucaguaacuaugccaa

SEQ ID NO: 23415 - RNA, 20 nt, Artificial Sequence
  HTT spacer sequence GTCN PAM
gaguggaaaugggggugggg

SEQ ID NO: 23416 - RNA, 20 nt, Artificial Sequence
  HTT spacer sequence GTCN PAM
acacugauggaagaacuccu

SEQ ID NO: 23417 - RNA, 20 nt, Artificial Sequence
  HTT spacer sequence GTCN PAM
acagcggaaucacaguguag

SEQ ID NO: 23418 - RNA, 20 nt, Artificial Sequence
  HTT spacer sequence GTCN PAM
acacugugauuccgcugugg

SEQ ID NO: 23419 - RNA, 20 nt, Artificial Sequence
  HTT spacer sequence GTCN PAM
ucuacacugugauuccgcug

SEQ ID NO: 23420 - RNA, 20 nt, Artificial Sequence
  HTT spacer sequence GTCN PAM
ccagcccccagcagagucgu

SEQ ID NO: 23421 - RNA, 20 nt, Artificial Sequence
  HTT spacer sequence GTCN PAM
ucagcccagccaggucccca

SEQ ID NO: 23422 - RNA, 20 nt, Artificial Sequence
  HTT spacer sequence GTCN PAM
gguccucagcccagccaggu

SEQ ID NO: 23423 - RNA, 20 nt, Artificial Sequence
  HTT spacer sequence GTCN PAM
cuaaacuucaacaccugcgc

SEQ ID NO: 23424 - RNA, 20 nt, Artificial Sequence
  HTT spacer sequence GTCN PAM
gaggcauuugaacaagagca

SEQ ID NO: 23425 - RNA, 20 nt, Artificial Sequence
  HTT spacer sequence GTCN PAM
caggcucauuuuacccagcc

SEQ ID NO: 23426 - RNA, 20 nt, Artificial Sequence
  HTT spacer sequence GTCN PAM
caaagagcuugcugauaaaa

SEQ ID NO: 23427 - RNA, 20 nt, Artificial Sequence
  HTT spacer sequence GTCN PAM
guuuuaucagcaagcucuuu

SEQ ID NO: 23428 - RNA, 20 nt, Artificial Sequence
  HTT spacer sequence GTCN PAM
cuaacuccuggccucaagug

SEQ ID NO: 23429 - RNA, 20 nt, Artificial Sequence
  HTT spacer sequence GTCN PAM
cuaauacaaaaauuagccag

SEQ ID NO: 23430 - RNA, 20 nt, Artificial Sequence
  HTT spacer sequence GTCN PAM
cagcuacucgggaggcugag

SEQ ID NO: 23431 - RNA, 20 nt, Artificial Sequence
  HTT spacer sequence GTCN PAM
gaggcugcagugagccgaga

SEQ ID NO: 23432 - RNA, 20 nt, Artificial Sequence
  HTT spacer sequence GTCN PAM
cggcucacugcagccucuga

SEQ ID NO: 23433 - RNA, 20 nt, Artificial Sequence
  HTT spacer sequence GTCN PAM
ugcucuguugcccaggucuc

SEQ ID NO: 23434 - RNA, 20 nt, Artificial Sequence
  HTT spacer sequence GTCN PAM
caaaaaaaauaauaaaauaa

SEQ ID NO: 23435 - RNA, 20 nt, Artificial Sequence
  HTT spacer sequence GTCN PAM
cucucaucgccaucuugguu

SEQ ID NO: 23436 - RNA, 20 nt, Artificial Sequence
  HTT spacer sequence GTCN PAM
uccucacagcucauuacaug

SEQ ID NO: 23437 - RNA, 20 nt, Artificial Sequence
  HTT spacer sequence GTCN PAM
uuuggcauguuaaugcauua

SEQ ID NO: 23438 - RNA, 20 nt, Artificial Sequence
  HTT spacer sequence GTCN PAM
uggcgcugaugggagugucu

SEQ ID NO: 23439 - RNA, 20 nt, Artificial Sequence
  HTT spacer sequence GTCN PAM
gaaagcuacccuguauguuc

SEQ ID NO: 23440 - RNA, 20 nt, Artificial Sequence
  HTT spacer sequence GTCN PAM
ggaucgggaccccuguccag

SEQ ID NO: 23441 - RNA, 20 nt, Artificial Sequence
  HTT spacer sequence GTCN PAM
cgauccagaccccaaaagag

SEQ ID NO: 23442 - RNA, 20 nt, Artificial Sequence
  HTT spacer sequence GTCN PAM
aguagcacucccuccaucuu

SEQ ID NO: 23443 - RNA, 20 nt, Artificial Sequence
  HTT spacer sequence GTCN PAM
aguuuccuccucagcaggca

SEQ ID NO: 23444 - RNA, 20 nt, Artificial Sequence
  HTT spacer sequence GTCN PAM
guucccaggucuaguuuccu

SEQ ID NO: 23445 - RNA, 20 nt, Artificial Sequence
  HTT spacer sequence GTCN PAM
uuuuuguuucuuuguuucuu

SEQ ID NO: 23446 - RNA, 20 nt, Artificial Sequence
  HTT spacer sequence GTCN PAM
gaguuaaauuuccccaugcc

SEQ ID NO: 23447 - RNA, 20 nt, Artificial Sequence
  HTT spacer sequence GTCN PAM
aagcuuucacuugggcaugg

SEQ ID NO: 23448 - RNA, 20 nt, Artificial Sequence
  HTT spacer sequence GTCN PAM
guguacaaauccuggccuag

SEQ ID NO: 23449 - RNA, 20 nt, Artificial Sequence
  HTT spacer sequence GTCN PAM
uugugcaggggcaaugcuaa

SEQ ID NO: 23450 - RNA, 20 nt, Artificial Sequence
  HTT spacer sequence GTCN PAM
uccuugugcaggggcaaugc

SEQ ID NO: 23451 - RNA, 20 nt, Artificial Sequence
  HTT spacer sequence GTCN PAM
uuaauauuagcugcugugca

SEQ ID NO: 23452 - RNA, 20 nt, Artificial Sequence
  HTT spacer sequence GTCN PAM
uuuggcugcuuaaauuuuua

SEQ ID NO: 23453 - RNA, 20 nt, Artificial Sequence
  HTT spacer sequence GTCN PAM
cgcucuguugcccaggcugg

SEQ ID NO: 23454 - RNA, 20 nt, Artificial Sequence
  HTT spacer sequence GTCN PAM
acauggugaaaccccaucug

SEQ ID NO: 23455 - RNA, 20 nt, Artificial Sequence
  HTT spacer sequence GTCN PAM
cgaaccccuggccuuaagua

SEQ ID NO: 23456 - RNA, 20 nt, Artificial Sequence
  HTT spacer sequence GTCN PAM
uccaugauauugugaaguua

SEQ ID NO: 23457 - RNA, 20 nt, Artificial Sequence
  HTT spacer sequence GTCN PAM
ccuggcauauauuuccccaa

SEQ ID NO: 23458 - RNA, 20 nt, Artificial Sequence
  HTT spacer sequence GTCN PAM
uuuuuguauguuaaugaggu

SEQ ID NO: 23459 - RNA, 20 nt, Artificial Sequence
  HTT spacer sequence GTCN PAM
aggagccaccagccaccuca

SEQ ID NO: 23460 - RNA, 20 nt, Artificial Sequence
  HTT spacer sequence GTCN PAM
ccagaaagaagaagguaggg

SEQ ID NO: 23461 - RNA, 20 nt, Artificial Sequence
  HTT spacer sequence GTCN PAM
caaccuucuaacccuaccuu

SEQ ID NO: 23462 - RNA, 20 nt, Artificial Sequence
  HTT spacer sequence GTCN PAM
ucuuggguuuuuauggaggc

SEQ ID NO: 23463 - RNA, 20 nt, Artificial Sequence
  HTT spacer sequence GTCN PAM
ccguagaagggaggugcgcu

SEQ ID NO: 23464 - RNA, 20 nt, Artificial Sequence
  HTT spacer sequence GTCN PAM
caagcacaggagcuucuguc

SEQ ID NO: 23465 - RNA, 20 nt, Artificial Sequence
  HTT spacer sequence GTCN PAM
gucagaaucacaggccaaau

SEQ ID NO: 23466 - RNA, 20 nt, Artificial Sequence
  HTT spacer sequence GTCN PAM
gaaucacaggccaaauaacc

SEQ ID NO: 23467 - RNA, 20 nt, Artificial Sequence
  HTT spacer sequence GTCN PAM
ugugggaacugaguccucga

SEQ ID NO: 23468 - RNA, 20 nt, Artificial Sequence
  HTT spacer sequence GTCN PAM
ucgaucuguguggucaggcg

SEQ ID NO: 23469 - RNA, 20 nt, Artificial Sequence
  HTT spacer sequence GTCN PAM
ggcgcugucuacagguagau

SEQ ID NO: 23470 - RNA, 20 nt, Artificial Sequence
  HTT spacer sequence GTCN PAM
acagguagaugccgucagac

SEQ ID NO: 23471 - RNA, 20 nt, Artificial Sequence
  HTT spacer sequence GTCN PAM
gacuugaaugagaggacacc

SEQ ID NO: 23472 - RNA, 20 nt, Artificial Sequence
  HTT spacer sequence GTCN PAM
gacggcaucuaccuguagac

SEQ ID NO: 23473 - RNA, 20 nt, Artificial Sequence
  HTT spacer sequence GTCN PAM
ucucauucaagucugacggc

SEQ ID NO: 23474 - RNA, 20 nt, Artificial Sequence
  HTT spacer sequence GTCN PAM
gcugcagaacugauugcuug

SEQ ID NO: 23475 - RNA, 20 nt, Artificial Sequence
  HTT spacer sequence GTCN PAM
uuuuccuguucucucacuca

SEQ ID NO: 23476 - RNA, 20 nt, Artificial Sequence
  HTT spacer sequence GTCN PAM
cguguucaaaaaauguuggg

SEQ ID NO: 23477 - RNA, 20 nt, Artificial Sequence
  HTT spacer sequence GTCN PAM
gagggaggaaaaccacaucc

SEQ ID NO: 23478 - RNA, 20 nt, Artificial Sequence
  HTT spacer sequence GTCN PAM
aaaggugaagcagaggacac

SEQ ID NO: 23479 - RNA, 20 nt, Artificial Sequence
  HTT spacer sequence GTCN PAM
ucugcuucaccuuuugacgu

SEQ ID NO: 23480 - RNA, 20 nt, Artificial Sequence
  HTT spacer sequence GTCN PAM
ccagaggcggugcagugagg

SEQ ID NO: 23481 - RNA, 20 nt, Artificial Sequence
  HTT spacer sequence GTCN PAM
cuuaccaggaagggaagcau

SEQ ID NO: 23482 - RNA, 20 nt, Artificial Sequence
  HTT spacer sequence GTCN PAM
guucuuuuuuucuagagcug

SEQ ID NO: 23483 - RNA, 20 nt, Artificial Sequence
  HTT spacer sequence GTCN PAM
gaccuguccugucacggcca

SEQ ID NO: 23484 - RNA, 20 nt, Artificial Sequence
  HTT spacer sequence GTCN PAM
gacucgccucagugugcccc

SEQ ID NO: 23485 - RNA, 20 nt, Artificial Sequence
  HTT spacer sequence GTCN PAM
ugucacggccaggaacucag

SEQ ID NO: 23486 - RNA, 20 nt, Artificial Sequence
  HTT spacer sequence GTCN PAM
cggccaggaacucaguuuuu

SEQ ID NO: 23487 - RNA, 20 nt, Artificial Sequence
  HTT spacer sequence GTCN PAM
ccucgaccaagaagcggucc

SEQ ID NO: 23488 - RNA, 20 nt, Artificial Sequence
  HTT spacer sequence GTCN PAM
aggagaccucagagaaaccu

SEQ ID NO: 23489 - RNA, 20 nt, Artificial Sequence
  HTT spacer sequence GTCN PAM
gcucaguuggcagggguuuu

SEQ ID NO: 23490 - RNA, 20 nt, Artificial Sequence
  HTT spacer sequence GTCN PAM
cucugaaucugcugugauuc

SEQ ID NO: 23491 - RNA, 20 nt, Artificial Sequence
  HTT spacer sequence GTCN PAM
gaacaaaucuauagacaaaa

SEQ ID NO: 23492 - RNA, 20 nt, Artificial Sequence
  HTT spacer sequence GTCN PAM
auagauuuguucugaccacg

SEQ ID NO: 23493 - RNA, 20 nt, Artificial Sequence
  HTT spacer sequence GTCN PAM
cuucccuuuuuugucuauag

SEQ ID NO: 23494 - RNA, 20 nt, Artificial Sequence
  HTT spacer sequence GTCN PAM
aaauaaggcaaaugccgagc

SEQ ID NO: 23495 - RNA, 20 nt, Artificial Sequence
  HTT spacer sequence GTCN PAM
uggccaaucccagcagccgu

SEQ ID NO: 23496 - RNA, 20 nt, Artificial Sequence
  HTT spacer sequence GTCN PAM
gcaccuguggcaguaccuga

SEQ ID NO: 23497 - RNA, 20 nt, Artificial Sequence
  HTT spacer sequence GTCN PAM
ggguuucagucuugucuacc

SEQ ID NO: 23498 - RNA, 20 nt, Artificial Sequence
  HTT spacer sequence GTCN PAM
ugucuaccaauuaaguuagg

SEQ ID NO: 23499 - RNA, 20 nt, Artificial Sequence
  HTT spacer sequence GTCN PAM
accaauuaaguuagguugca

SEQ ID NO: 23500 - RNA, 20 nt, Artificial Sequence
  HTT spacer sequence GTCN PAM
acaaggacucaaauagagaa

SEQ ID NO: 23501 - RNA, 20 nt, Artificial Sequence
  HTT spacer sequence GTCN PAM
uuguggacgaacugcaaccu

SEQ ID NO: 23502 - RNA, 20 nt, Artificial Sequence
  HTT spacer sequence GTCN PAM
uucucaggccauauuuaguu

SEQ ID NO: 23503 - RNA, 20 nt, Artificial Sequence
  HTT spacer sequence GTCN PAM
uuuucucaauuuugagagau

SEQ ID NO: 23504 - RNA, 20 nt, Artificial Sequence
  HTT spacer sequence GTCN PAM
aucucucaaaauugagaaaa

SEQ ID NO: 23505 - RNA, 20 nt, Artificial Sequence
  HTT spacer sequence GTCN PAM
uugaugucacuaucaccauc

SEQ ID NO: 23506 - RNA, 20 nt, Artificial Sequence
  HTT spacer sequence GTCN PAM
cuaucaccaucguaaaugua

SEQ ID NO: 23507 - RNA, 20 nt, Artificial Sequence
  HTT spacer sequence GTCN PAM
ugaaacccucugagaaacag

SEQ ID NO: 23508 - RNA, 20 nt, Artificial Sequence
  HTT spacer sequence GTCN PAM
uuguuccuaccuuugcaaaa

SEQ ID NO: 23509 - RNA, 20 nt, Artificial Sequence
  HTT spacer sequence GTCN PAM
uguuuauaggggaaucuguu

SEQ ID NO: 23510 - RNA, 20 nt, Artificial Sequence
  HTT spacer sequence GTCN PAM
uaguuugauuaugucacauu

SEQ ID NO: 23511 - RNA, 20 nt, Artificial Sequence
  HTT spacer sequence GTCN PAM
cauuuagcaugagugacucc

SEQ ID NO: 23512 - RNA, 20 nt, Artificial Sequence
  HTT spacer sequence GTCN PAM
cucaugcuaaaugugacaua

SEQ ID NO: 23513 - RNA, 20 nt, Artificial Sequence
  HTT spacer sequence GTCN PAM
guugggacauagugcaugag

SEQ ID NO: 23514 - RNA, 20 nt, Artificial Sequence
  HTT spacer sequence GTCN PAM
caacagacuaagccaaacaa

SEQ ID NO: 23515 - RNA, 20 nt, Artificial Sequence
  HTT spacer sequence GTCN PAM
aaaacaauggccucccauaa

SEQ ID NO: 23516 - RNA, 20 nt, Artificial Sequence
  HTT spacer sequence GTCN PAM
agguucucacuuaggugagu

SEQ ID NO: 23517 - RNA, 20 nt, Artificial Sequence
  HTT spacer sequence GTCN PAM
ugccuuggcagcuggguggc

SEQ ID NO: 23518 - RNA, 20 nt, Artificial Sequence
  HTT spacer sequence GTCN PAM
ggagaucgagaccauccugg

SEQ ID NO: 23519 - RNA, 20 nt, Artificial Sequence
  HTT spacer sequence GTCN PAM
cgaucuccugaccucaugau

SEQ ID NO: 23520 - RNA, 20 nt, Artificial Sequence
  HTT spacer sequence GTCN PAM
cuacuaaaaauacaaaaaau

SEQ ID NO: 23521 - RNA, 20 nt, Artificial Sequence
  HTT spacer sequence GTCN PAM
cagcuacucgggaggcugag

SEQ ID NO: 23522 - RNA, 20 nt, Artificial Sequence
  HTT spacer sequence GTCN PAM
cccaggcuggagggcagugg

SEQ ID NO: 23523 - RNA, 20 nt, Artificial Sequence
  HTT spacer sequence GTCN PAM
cgcucugucacccaggcugg

SEQ ID NO: 23524 - RNA, 20 nt, Artificial Sequence
  HTT spacer sequence GTCN PAM
caaaaaacaaaaacaaaaac

SEQ ID NO: 23525 - RNA, 20 nt, Artificial Sequence
  HTT spacer sequence GTCN PAM
uaucuaaucauaucuauaau

SEQ ID NO: 23526 - RNA, 20 nt, Artificial Sequence
  HTT spacer sequence GTCN PAM
cuucagcuccuaucucugua

SEQ ID NO: 23527 - RNA, 20 nt, Artificial Sequence
  HTT spacer sequence GTCN PAM
cuucucacccugucccuuca

SEQ ID NO: 23528 - RNA, 20 nt, Artificial Sequence
  HTT spacer sequence GTCN PAM
ucuggucacuucucacccug

SEQ ID NO: 23529 - RNA, 20 nt, Artificial Sequence
  HTT spacer sequence GTCN PAM
cgcucagacagggccacuag

SEQ ID NO: 23530 - RNA, 20 nt, Artificial Sequence
  HTT spacer sequence GTCN PAM
gagcgugacagagggcucac

SEQ ID NO: 23531 - RNA, 20 nt, Artificial Sequence
  HTT spacer sequence GTCN PAM
agugguaaugacagugccug

SEQ ID NO: 23532 - RNA, 20 nt, Artificial Sequence
  HTT spacer sequence GTCN PAM
uuaccacuagaccagggagc

SEQ ID NO: 23533 - RNA, 20 nt, Artificial Sequence
  HTT spacer sequence GTCN PAM
gcuaaguaacaggugccuuc

SEQ ID NO: 23534 - RNA, 20 nt, Artificial Sequence
  HTT spacer sequence GTCN PAM
cccuuuggccaggggagagg

SEQ ID NO: 23535 - RNA, 20 nt, Artificial Sequence
  HTT spacer sequence GTCN PAM
ucucuaaccccuccgccccu

SEQ ID NO: 23536 - RNA, 20 nt, Artificial Sequence
  HTT spacer sequence GTCN PAM
ggccuuccacaagagauggu

SEQ ID NO: 23537 - RNA, 20 nt, Artificial Sequence
  HTT spacer sequence GTCN PAM
ggcccgcccacagccauccg

SEQ ID NO: 23538 - RNA, 20 nt, Artificial Sequence
  HTT spacer sequence GTCN PAM
ggccuccggauggcuguggg

SEQ ID NO: 23539 - RNA, 20 nt, Artificial Sequence
  HTT spacer sequence GTCN PAM
cgcuccuguuucacuuucau

SEQ ID NO: 23540 - RNA, 20 nt, Artificial Sequence
  HTT spacer sequence GTCN PAM
uugaaaugcauagaagaaau

SEQ ID NO: 23541 - RNA, 20 nt, Artificial Sequence
  HTT spacer sequence GTCN PAM
uuauuucuucuaugcauuuc

SEQ ID NO: 23542 - RNA, 20 nt, Artificial Sequence
  HTT spacer sequence GTCN PAM
ccucucucucuccgccucgg

SEQ ID NO: 23543 - RNA, 20 nt, Artificial Sequence
  HTT spacer sequence GTCN PAM
gguggacacgugacuugcgu

SEQ ID NO: 23544 - RNA, 20 nt, Artificial Sequence
  HTT spacer sequence GTCN PAM
accggacagggugcccuucc

SEQ ID NO: 23545 - RNA, 20 nt, Artificial Sequence
  HTT spacer sequence GTCN PAM
cguguccaccggacagggug

SEQ ID NO: 23546 - RNA, 20 nt, Artificial Sequence
  HTT spacer sequence GTCN PAM
cgcaagucacguguccaccg

SEQ ID NO: 23547 - RNA, 20 nt, Artificial Sequence
  HTT spacer sequence GTCN PAM
ggucacgcaagucacguguc

SEQ ID NO: 23548 - RNA, 20 nt, Artificial Sequence
  HTT spacer sequence GTCN PAM
ucuccaaugauaggucaggu

SEQ ID NO: 23549 - RNA, 20 nt, Artificial Sequence
  HTT spacer sequence GTCN PAM
uguauccaauaaguaacagg

SEQ ID NO: 23550 - RNA, 20 nt, Artificial Sequence
  HTT spacer sequence GTCN PAM
ccgugucuaggugguagugg

SEQ ID NO: 23551 - RNA, 20 nt, Artificial Sequence
  HTT spacer sequence GTCN PAM
aggugguagugguccccugg

SEQ ID NO: 23552 - RNA, 20 nt, Artificial Sequence
  HTT spacer sequence GTCN PAM
ccugggcccagcugucuuuu

SEQ ID NO: 23553 - RNA, 20 nt, Artificial Sequence
  HTT spacer sequence GTCN PAM
uuucuucuaucucuuugucu

SEQ ID NO: 23554 - RNA, 20 nt, Artificial Sequence
  HTT spacer sequence GTCN PAM
uguguccuuauuucugugau

SEQ ID NO: 23555 - RNA, 20 nt, Artificial Sequence
  HTT spacer sequence GTCN PAM
uuauuucugugaucucucau

SEQ ID NO: 23556 - RNA, 20 nt, Artificial Sequence
  HTT spacer sequence GTCN PAM
agcccuacugggccuguggg

SEQ ID NO: 23557 - RNA, 20 nt, Artificial Sequence
  HTT spacer sequence GTCN PAM
cacucucgccuguagggucc

SEQ ID NO: 23558 - RNA, 20 nt, Artificial Sequence
  HTT spacer sequence GTCN PAM
cagcacgucauucauagguu

SEQ ID NO: 23559 - RNA, 20 nt, Artificial Sequence
  HTT spacer sequence GTCN PAM
uucauagguuacgguguccu

SEQ ID NO: 23560 - RNA, 20 nt, Artificial Sequence
  HTT spacer sequence GTCN PAM
ucauggucacacauuucuuu

SEQ ID NO: 23561 - RNA, 20 nt, Artificial Sequence
  HTT spacer sequence GTCN PAM
cacauuucuuucagcuucug

SEQ ID NO: 23562 - RNA, 20 nt, Artificial Sequence
  HTT spacer sequence GTCN PAM
cucuucaacuggaauggcag

SEQ ID NO: 23563 - RNA, 20 nt, Artificial Sequence
  HTT spacer sequence GTCN PAM
gcaugcagccaucucuagaa

SEQ ID NO: 23564 - RNA, 20 nt, Artificial Sequence
  HTT spacer sequence GTCN PAM
cccuggugcgcugcauucuc

SEQ ID NO: 23565 - RNA, 20 nt, Artificial Sequence
  HTT spacer sequence GTCN PAM
cuauacaccaaaccacccca

SEQ ID NO: 23566 - RNA, 20 nt, Artificial Sequence
  HTT spacer sequence GTCN PAM
gaucuauuugauuuggggug

SEQ ID NO: 23567 - RNA, 20 nt, Artificial Sequence
  HTT spacer sequence GTCN PAM
auucuauuauuuagcauacc

SEQ ID NO: 23568 - RNA, 20 nt, Artificial Sequence
  HTT spacer sequence GTCN PAM
guuguguaacuauagccuuu

SEQ ID NO: 23569 - RNA, 20 nt, Artificial Sequence
  HTT spacer sequence GTCN PAM
gcuauacagccuaucaugag

SEQ ID NO: 23570 - RNA, 20 nt, Artificial Sequence
  HTT spacer sequence GTCN PAM
gaaacagaauaucgguucac

SEQ ID NO: 23571 - RNA, 20 nt, Artificial Sequence
  HTT spacer sequence GTCN PAM
cauuaaaguuucucaccuac

SEQ ID NO: 23572 - RNA, 20 nt, Artificial Sequence
  HTT spacer sequence GTCN PAM
aguguaggugagaaacuuua

SEQ ID NO: 23573 - RNA, 20 nt, Artificial Sequence
  HTT spacer sequence GTCN PAM
uuucauuucuauuauucaua

SEQ ID NO: 23574 - RNA, 20 nt, Artificial Sequence
  HTT spacer sequence GTCN PAM
cauggccaggcgugguggug

SEQ ID NO: 23575 - RNA, 20 nt, Artificial Sequence
  HTT spacer sequence GTCN PAM
cagcucacugcaaccucugc

SEQ ID NO: 23576 - RNA, 20 nt, Artificial Sequence
  HTT spacer sequence GTCN PAM
cccaggcuggagugcggugg

SEQ ID NO: 23577 - RNA, 20 nt, Artificial Sequence
  HTT spacer sequence GTCN PAM
ugcucugucacccaggcugg

SEQ ID NO: 23578 - RNA, 20 nt, Artificial Sequence
  HTT spacer sequence GTCN PAM
caugacaguagaagucuuga

SEQ ID NO: 23579 - RNA, 20 nt, Artificial Sequence
  HTT spacer sequence GTCN PAM
ugagacucucuuuuuuuuuu

SEQ ID NO: 23580 - RNA, 20 nt, Artificial Sequence
  HTT spacer sequence GTCN PAM
ugauccacgaucuuagcaaa

SEQ ID NO: 23581 - RNA, 20 nt, Artificial Sequence
  HTT spacer sequence GTCN PAM
cuccccagaagauggcaucc

SEQ ID NO: 23582 - RNA, 20 nt, Artificial Sequence
  HTT spacer sequence GTCN PAM
auccacacuccuggaacugu

SEQ ID NO: 23583 - RNA, 20 nt, Artificial Sequence
  HTT spacer sequence GTCN PAM
uugccauccgcacugcaaca

SEQ ID NO: 23584 - RNA, 20 nt, Artificial Sequence
  HTT spacer sequence GTCN PAM
uucucugauguucucagaag

SEQ ID NO: 23585 - RNA, 20 nt, Artificial Sequence
  HTT spacer sequence GTCN PAM
ucggguucuagaaugcaaag

SEQ ID NO: 23586 - RNA, 20 nt, Artificial Sequence
  HTT spacer sequence GTCN PAM
aacccuuugcauucuagaac

SEQ ID NO: 23587 - RNA, 20 nt, Artificial Sequence
  HTT spacer sequence GTCN PAM
uuuucaaugcauguuuuccg

SEQ ID NO: 23588 - RNA, 20 nt, Artificial Sequence
  HTT spacer sequence GTCN PAM
cccaggcuggagugcagcgg

SEQ ID NO: 23589 - RNA, 20 nt, Artificial Sequence
  HTT spacer sequence GTCN PAM
cgaaaugcagaacuuuuaau

SEQ ID NO: 23590 - RNA, 20 nt, Artificial Sequence
  HTT spacer sequence GTCN PAM
uuaaagcuuuuguuauuaaa

SEQ ID NO: 23591 - RNA, 20 nt, Artificial Sequence
  HTT spacer sequence GTCN PAM
uuccugaguccuuaaagcuu

SEQ ID NO: 23592 - RNA, 20 nt, Artificial Sequence
  HTT spacer sequence GTCN PAM
ugguucuccgugaguccaua

SEQ ID NO: 23593 - RNA, 20 nt, Artificial Sequence
  HTT spacer sequence GTCN PAM
auacuuaauuaacauuagac

SEQ ID NO: 23594 - RNA, 20 nt, Artificial Sequence
  HTT spacer sequence GTCN PAM
aauguuaauuaaguauggac

SEQ ID NO: 23595 - RNA, 20 nt, Artificial Sequence
  HTT spacer sequence GTCN PAM
ucuugaaucccaguugcuuc

SEQ ID NO: 23596 - RNA, 20 nt, Artificial Sequence
  HTT spacer sequence GTCN PAM
aauuaccugugauaacccau

SEQ ID NO: 23597 - RNA, 20 nt, Artificial Sequence
  HTT spacer sequence GTCN PAM
aagucaaauuaccugugaua

SEQ ID NO: 23598 - RNA, 20 nt, Artificial Sequence
  HTT spacer sequence GTCN PAM
gcugauuuaagaugaaaauc

SEQ ID NO: 23599 - RNA, 20 nt, Artificial Sequence
  HTT spacer sequence GTCN PAM
gucuuuucauuaaaguucca

SEQ ID NO: 23600 - RNA, 20 nt, Artificial Sequence
  HTT spacer sequence GTCN PAM
uuucauuaaaguuccaggaa

SEQ ID NO: 23601 - RNA, 20 nt, Artificial Sequence
  HTT spacer sequence GTCN PAM
uggaauacagguuucuaaua

SEQ ID NO: 23602 - RNA, 20 nt, Artificial Sequence
  HTT spacer sequence GTCN PAM
uuuucauccuuuuaugaauc

SEQ ID NO: 23603 - RNA, 20 nt, Artificial Sequence
  HTT spacer sequence GTCN PAM
uuuaggagauucauaaaagg

SEQ ID NO: 23604 - RNA, 20 nt, Artificial Sequence
  HTT spacer sequence GTCN PAM
uuuccacaguuaauugcuua

SEQ ID NO: 23605 - RNA, 20 nt, Artificial Sequence
  HTT spacer sequence GTCN PAM
uaguuaaaaacacaauugac

SEQ ID NO: 23606 - RNA, 20 nt, Artificial Sequence
  HTT spacer sequence GTCN PAM
auuguguuuuuaacuaugac

SEQ ID NO: 23607 - RNA, 20 nt, Artificial Sequence
  HTT spacer sequence GTCN PAM
augcuaucaauauaauuaug

SEQ ID NO: 23608 - RNA, 20 nt, Artificial Sequence
  HTT spacer sequence GTCN PAM
aaaaauaauguuuacuccuc

SEQ ID NO: 23609 - RNA, 20 nt, Artificial Sequence
  HTT spacer sequence GTCN PAM
gaaagacuauuuugaagcug

SEQ ID NO: 23610 - RNA, 20 nt, Artificial Sequence
  HTT spacer sequence GTCN PAM
uucugaccucuaacuuuggg

SEQ ID NO: 23611 - RNA, 20 nt, Artificial Sequence
  HTT spacer sequence GTCN PAM
aacugguuaagcauaacauc

SEQ ID NO: 23612 - RNA, 20 nt, Artificial Sequence
  HTT spacer sequence GTCN PAM
cuguacuccagccugggcaa

SEQ ID NO: 23613 - RNA, 20 nt, Artificial Sequence
  HTT spacer sequence GTCN PAM
cuacuaaaaauacaaaauua

SEQ ID NO: 23614 - RNA, 20 nt, Artificial Sequence
  HTT spacer sequence GTCN PAM
ggcuggucucgaacucccga

SEQ ID NO: 23615 - RNA, 20 nt, Artificial Sequence
  HTT spacer sequence GTCN PAM
cgaacucccgaccucaggug

SEQ ID NO: 23616 - RNA, 20 nt, Artificial Sequence
  HTT spacer sequence GTCN PAM
ggaguucgagaccagccuga

SEQ ID NO: 23617 - RNA, 20 nt, Artificial Sequence
  HTT spacer sequence GTCN PAM
cuagggcuacucagggaaag

SEQ ID NO: 23618 - RNA, 20 nt, Artificial Sequence
  HTT spacer sequence GTCN PAM
gauuucugaccucucucucu

SEQ ID NO: 23619 - RNA, 20 nt, Artificial Sequence
  HTT spacer sequence GTCN PAM
gaaaucugacugguaagaaa

SEQ ID NO: 23620 - RNA, 20 nt, Artificial Sequence
  HTT spacer sequence GTCN PAM
ucccgugcuguucugugaua

SEQ ID NO: 23621 - RNA, 20 nt, Artificial Sequence
  HTT spacer sequence GTCN PAM
guaacugcugcagaucccug

SEQ ID NO: 23622 - RNA, 20 nt, Artificial Sequence
  HTT spacer sequence GTCN PAM
ccaucuuguuuuaagucuuu

SEQ ID NO: 23623 - RNA, 20 nt, Artificial Sequence
  HTT spacer sequence GTCN PAM
uugggaguuugaccuuguaa

SEQ ID NO: 23624 - RNA, 20 nt, Artificial Sequence
  HTT spacer sequence GTCN PAM
aacucccaaagacuuaaaac

SEQ ID NO: 23625 - RNA, 20 nt, Artificial Sequence
  HTT spacer sequence GTCN PAM
ccaccuuccaaguggaacag

SEQ ID NO: 23626 - RNA, 20 nt, Artificial Sequence
  HTT spacer sequence GTCN PAM
uaguuagcucuacaaucuau

SEQ ID NO: 23627 - RNA, 20 nt, Artificial Sequence
  HTT spacer sequence GTCN PAM
agaguaguuaauuuucagcu

SEQ ID NO: 23628 - RNA, 20 nt, Artificial Sequence
  HTT spacer sequence GTCN PAM
ccauugcccuucccagaaag

SEQ ID NO: 23629 - RNA, 20 nt, Artificial Sequence
  HTT spacer sequence GTCN PAM
ugaauugccuuucucagagc

SEQ ID NO: 23630 - RNA, 20 nt, Artificial Sequence
  HTT spacer sequence GTCN PAM
gcuuaauuaaaaguagauau

SEQ ID NO: 23631 - RNA, 20 nt, Artificial Sequence
  HTT spacer sequence GTCN PAM
caggcuguuagagccagaau

SEQ ID NO: 23632 - RNA, 20 nt, Artificial Sequence
  HTT spacer sequence GTCN PAM
cuggcaccuccuguuuuccc

SEQ ID NO: 23633 - RNA, 20 nt, Artificial Sequence
  HTT spacer sequence GTCN PAM
cuaugugaaguaauuucuga

SEQ ID NO: 23634 - RNA, 20 nt, Artificial Sequence
  HTT spacer sequence GTCN PAM
aauggcaguuauggggcuga

SEQ ID NO: 23635 - RNA, 20 nt, Artificial Sequence
  HTT spacer sequence GTCN PAM
gccccauaacugccauuaga

SEQ ID NO: 23636 - RNA, 20 nt, Artificial Sequence
  HTT spacer sequence GTCN PAM
cguuuuuauaccagauccug

SEQ ID NO: 23637 - RNA, 20 nt, Artificial Sequence
  HTT spacer sequence GTCN PAM
cgaacuccugagcucaggca

SEQ ID NO: 23638 - RNA, 20 nt, Artificial Sequence
  HTT spacer sequence GTCN PAM
cagcuauuugggaggcugag

SEQ ID NO: 23639 - RNA, 20 nt, Artificial Sequence
  HTT spacer sequence GTCN PAM
ccaggcuggagugcaguggc

SEQ ID NO: 23640 - RNA, 20 nt, Artificial Sequence
  HTT spacer sequence GTCN PAM
ugcucugucaccaggcugga

SEQ ID NO: 23641 - RNA, 20 nt, Artificial Sequence
  HTT spacer sequence GTCN PAM
caaaaaaaaaaaagagaccc

SEQ ID NO: 23642 - RNA, 20 nt, Artificial Sequence
  HTT spacer sequence GTCN PAM
cuuuuuuuuuuuugagacgg

SEQ ID NO: 23643 - RNA, 20 nt, Artificial Sequence
  HTT spacer sequence GTCN PAM
uguucuuccaaggacuccau

SEQ ID NO: 23644 - RNA, 20 nt, Artificial Sequence
  HTT spacer sequence GTCN PAM
uuggaagaacaggaccagga

SEQ ID NO: 23645 - RNA, 20 nt, Artificial Sequence
  HTT spacer sequence GTCN PAM
gucuguguaguuauauaugu

SEQ ID NO: 23646 - RNA, 20 nt, Artificial Sequence
  HTT spacer sequence GTCN PAM
guguaguuauauauguguug

SEQ ID NO: 23647 - RNA, 20 nt, Artificial Sequence
  HTT spacer sequence GTCN PAM
ggaguucgagaccagccugg

SEQ ID NO: 23648 - RNA, 20 nt, Artificial Sequence
  HTT spacer sequence GTCN PAM
cgaacuccugaccucaggcg

SEQ ID NO: 23649 - RNA, 20 nt, Artificial Sequence
  HTT spacer sequence GTCN PAM
ccacuaaaaauacaaaaauu

SEQ ID NO: 23650 - RNA, 20 nt, Artificial Sequence
  HTT spacer sequence GTCN PAM
ggaugacagagugagacucu

SEQ ID NO: 23651 - RNA, 20 nt, Artificial Sequence
  HTT spacer sequence GTCN PAM
uccagacuugggugcagugg

SEQ ID NO: 23652 - RNA, 20 nt, Artificial Sequence
  HTT spacer sequence GTCN PAM
cacucugucauccagacuug

SEQ ID NO: 23653 - RNA, 20 nt, Artificial Sequence
  HTT spacer sequence GTCN PAM
caaaauaaaaauaaaaauaa

SEQ ID NO: 23654 - RNA, 20 nt, Artificial Sequence
  HTT spacer sequence GTCN PAM
uuauuuucaccaguaaccuu

SEQ ID NO: 23655 - RNA, 20 nt, Artificial Sequence
  HTT spacer sequence GTCN PAM
aauggcgugaucuaggcuca

SEQ ID NO: 23656 - RNA, 20 nt, Artificial Sequence
  HTT spacer sequence GTCN PAM
gccucucgggguucaagcaa

SEQ ID NO: 23657 - RNA, 20 nt, Artificial Sequence
  HTT spacer sequence GTCN PAM
ugaacuccugaccucaugau

SEQ ID NO: 23658 - RNA, 20 nt, Artificial Sequence
  HTT spacer sequence GTCN PAM
ggaguucaagaccagccugg

SEQ ID NO: 23659 - RNA, 20 nt, Artificial Sequence
  HTT spacer sequence GTCN PAM
uaaacugcuuugacuuuucu

SEQ ID NO: 23660 - RNA, 20 nt, Artificial Sequence
  HTT spacer sequence GTCN PAM
aagcaguuuaugaccuuaaa

SEQ ID NO: 23661 - RNA, 20 nt, Artificial Sequence
  HTT spacer sequence GTCN PAM
gcaggccuuaucuagaaucu

SEQ ID NO: 23662 - RNA, 20 nt, Artificial Sequence
  HTT spacer sequence GTCN PAM
uaaacacuccucuuuuuaaa

SEQ ID NO: 23663 - RNA, 20 nt, Artificial Sequence
  HTT spacer sequence GTCN PAM
aaccaugccauagauggccu

SEQ ID NO: 23664 - RNA, 20 nt, Artificial Sequence
  HTT spacer sequence GTCN PAM
auauguucacacacagaauu

SEQ ID NO: 23665 - RNA, 20 nt, Artificial Sequence
  HTT spacer sequence GTCN PAM
cgcucugucacccaggcugg

SEQ ID NO: 23666 - RNA, 20 nt, Artificial Sequence
  HTT spacer sequence GTCN PAM
cccaggcuggagugcagugg

SEQ ID NO: 23667 - RNA, 20 nt, Artificial Sequence
  HTT spacer sequence GTCN PAM
cuacuaaaaauacaaacauu

SEQ ID NO: 23668 - RNA, 20 nt, Artificial Sequence
  HTT spacer sequence GTCN PAM
ugaacuccugaccucgugau

SEQ ID NO: 23669 - RNA, 20 nt, Artificial Sequence
  HTT spacer sequence GTCN PAM
ggaguucaagaccagccugg

SEQ ID NO: 23670 - RNA, 20 nt, Artificial Sequence
  HTT spacer sequence GTCN PAM
ccacgccuggccaacagggu

SEQ ID NO: 23671 - RNA, 20 nt, Artificial Sequence
  HTT spacer sequence GTCN PAM
ggagaucgagaccauccggg

SEQ ID NO: 23672 - RNA, 20 nt, Artificial Sequence
  HTT spacer sequence GTCN PAM
cgaucuccugaccucgugau

SEQ ID NO: 23673 - RNA, 20 nt, Artificial Sequence
  HTT spacer sequence GTCN PAM
cagcuacucaggaggcugag

SEQ ID NO: 23674 - RNA, 20 nt, Artificial Sequence
  HTT spacer sequence GTCN PAM
cgcuguguugcccaggcugg

SEQ ID NO: 23675 - RNA, 20 nt, Artificial Sequence
  HTT spacer sequence GTCN PAM
aaaaaaaaaaaaagucucaa

SEQ ID NO: 23676 - RNA, 20 nt, Artificial Sequence
  HTT spacer sequence GTCN PAM
caaacuagcccuggguuggg

SEQ ID NO: 23677 - RNA, 20 nt, Artificial Sequence
  HTT spacer sequence GTCN PAM
ucuuuaacccauuuuuaacc

SEQ ID NO: 23678 - RNA, 20 nt, Artificial Sequence
  HTT spacer sequence GTCN PAM
cucuggguuaaaaauggguu

SEQ ID NO: 23679 - RNA, 20 nt, Artificial Sequence
  HTT spacer sequence GTCN PAM
gccaauuugugcugcagccu

SEQ ID NO: 23680 - RNA, 20 nt, Artificial Sequence
  HTT spacer sequence GTCN PAM
gugcacuguuguucauucag

SEQ ID NO: 23681 - RNA, 20 nt, Artificial Sequence
  HTT spacer sequence GTCN PAM
ucuuuaguaagauuucacca

SEQ ID NO: 23682 - RNA, 20 nt, Artificial Sequence
  HTT spacer sequence GTCN PAM
uacagaaauggugaaaucuu

SEQ ID NO: 23683 - RNA, 20 nt, Artificial Sequence
  HTT spacer sequence GTCN PAM
gaaagaaacugguagaaaau

SEQ ID NO: 23684 - RNA, 20 nt, Artificial Sequence
  HTT spacer sequence GTCN PAM
gauguaagaggccucuaacu

SEQ ID NO: 23685 - RNA, 20 nt, Artificial Sequence
  HTT spacer sequence GTCN PAM
aggaauagauuugauacggu

SEQ ID NO: 23686 - RNA, 20 nt, Artificial Sequence
  HTT spacer sequence GTCN PAM
ccaaagaaaauggauggguc

SEQ ID NO: 23687 - RNA, 20 nt, Artificial Sequence
  HTT spacer sequence GTCN PAM
ucucuuggauuuuggagauc

SEQ ID NO: 23688 - RNA, 20 nt, Artificial Sequence
  HTT spacer sequence GTCN PAM
auugauuucucagagcagcu

SEQ ID NO: 23689 - RNA, 20 nt, Artificial Sequence
  HTT spacer sequence GTCN PAM
agcagguaccuuacuuguuc

SEQ ID NO: 23690 - RNA, 20 nt, Artificial Sequence
  HTT spacer sequence GTCN PAM
uuagaagcuuuacuuuggau

SEQ ID NO: 23691 - RNA, 20 nt, Artificial Sequence
  HTT spacer sequence GTCN PAM
gaagugggauccaaaguaaa

SEQ ID NO: 23692 - RNA, 20 nt, Artificial Sequence
  HTT spacer sequence GTCN PAM
ucagaaucccagcagauuca

SEQ ID NO: 23693 - RNA, 20 nt, Artificial Sequence
  HTT spacer sequence GTCN PAM
cucugaaucugcugggauuc

SEQ ID NO: 23694 - RNA, 20 nt, Artificial Sequence
  HTT spacer sequence GTCN PAM
gaacaaauuuacagacaaaa

SEQ ID NO: 23695 - RNA, 20 nt, Artificial Sequence
  HTT spacer sequence GTCN PAM
guaaauuuguucugaccaug

SEQ ID NO: 23696 - RNA, 20 nt, Artificial Sequence
  HTT spacer sequence GTCN PAM
cuucccguuuuuugucugua

SEQ ID NO: 23697 - RNA, 20 nt, Artificial Sequence
  HTT spacer sequence GTCN PAM
uugccaaucccagcagccau

SEQ ID NO: 23698 - RNA, 20 nt, Artificial Sequence
  HTT spacer sequence GTCN PAM
accuauaaguuagguuguag

SEQ ID NO: 23699 - RNA, 20 nt, Artificial Sequence
  HTT spacer sequence GTCN PAM
uuguggaugaacuacaaccu

SEQ ID NO: 23700 - RNA, 20 nt, Artificial Sequence
  HTT spacer sequence GTCN PAM
uucucaggccauauuuaguu

SEQ ID NO: 23701 - RNA, 20 nt, Artificial Sequence
  HTT spacer sequence GTCN PAM
uauagguguaaaagcaaacu

SEQ ID NO: 23702 - RNA, 20 nt, Artificial Sequence
  HTT spacer sequence GTCN PAM
uacagucacccccaccaucu

SEQ ID NO: 23703 - RNA, 20 nt, Artificial Sequence
  HTT spacer sequence GTCN PAM
cccccaccaucuaucauuca

SEQ ID NO: 23704 - RNA, 20 nt, Artificial Sequence
  HTT spacer sequence GTCN PAM
ccaugaaacacuaauuccac

SEQ ID NO: 23705 - RNA, 20 nt, Artificial Sequence
  HTT spacer sequence GTCN PAM
aauucauaaaaacagagggc

SEQ ID NO: 23706 - RNA, 20 nt, Artificial Sequence
  HTT spacer sequence GTCN PAM
caguggaaucagacagcauu

SEQ ID NO: 23707 - RNA, 20 nt, Artificial Sequence
  HTT spacer sequence GTCN PAM
gauuccacugagacaggaga

SEQ ID NO: 23708 - RNA, 20 nt, Artificial Sequence
  HTT spacer sequence GTCN PAM
caaggggcaaaugcugucug

SEQ ID NO: 23709 - RNA, 20 nt, Artificial Sequence
  HTT spacer sequence GTCN PAM
cgcucugucgcccaggcugg

SEQ ID NO: 23710 - RNA, 20 nt, Artificial Sequence
  HTT spacer sequence GTCN PAM
cccaggcuggagugcagugg

SEQ ID NO: 23711 - RNA, 20 nt, Artificial Sequence
  HTT spacer sequence GTCN PAM
cagccucccgaguagcuggg

SEQ ID NO: 23712 - RNA, 20 nt, Artificial Sequence
  HTT spacer sequence GTCN PAM
cagcuacucgggaggcugag

SEQ ID NO: 23713 - RNA, 20 nt, Artificial Sequence
  HTT spacer sequence GTCN PAM
cuacuaaagauacaaaaaau

SEQ ID NO: 23714 - RNA, 20 nt, Artificial Sequence
  HTT spacer sequence GTCN PAM
ucaucuccugaccucgugau

SEQ ID NO: 23715 - RNA, 20 nt, Artificial Sequence
  HTT spacer sequence GTCN PAM
ggagaugaagaccauccugg

SEQ ID NO: 23716 - RNA, 20 nt, Artificial Sequence
  HTT spacer sequence GTCN PAM
caggguggggugcaguggcu

SEQ ID NO: 23717 - RNA, 20 nt, Artificial Sequence
  HTT spacer sequence GTCN PAM
uuaugcuaagugaaaaagcc

SEQ ID NO: 23718 - RNA, 20 nt, Artificial Sequence
  HTT spacer sequence GTCN PAM
gaauuucccuccuauuuaag

SEQ ID NO: 23719 - RNA, 20 nt, Artificial Sequence
  HTT spacer sequence GTCN PAM
caaugcugaccccaagagag

SEQ ID NO: 23720 - RNA, 20 nt, Artificial Sequence
  HTT spacer sequence GTCN PAM
gcauugggaccccuuuccag

SEQ ID NO: 23721 - RNA, 20 nt, Artificial Sequence
  HTT spacer sequence GTCN PAM
gaauucuuucuugagcaaga

SEQ ID NO: 23722 - RNA, 20 nt, Artificial Sequence
  HTT spacer sequence GTCN PAM
acagaauaaaaugaaaguaa

SEQ ID NO: 23723 - RNA, 20 nt, Artificial Sequence
  HTT spacer sequence GTCN PAM
caaaaauaaauaaauaaaua

SEQ ID NO: 23724 - RNA, 20 nt, Artificial Sequence
  HTT spacer sequence GTCN PAM
cccuuuguugcccaggcugg

SEQ ID NO: 23725 - RNA, 20 nt, Artificial Sequence
  HTT spacer sequence GTCN PAM
cagcuacucaggaggcugag

SEQ ID NO: 23726 - RNA, 20 nt, Artificial Sequence
  HTT spacer sequence GTCN PAM
cuacuaaaaauacaaaaaau

SEQ ID NO: 23727 - RNA, 20 nt, Artificial Sequence
  HTT spacer sequence GTCN PAM
caaucuccugaccuugugau

SEQ ID NO: 23728 - RNA, 20 nt, Artificial Sequence
  HTT spacer sequence GTCN PAM
ggagauugagaccauccugg

SEQ ID NO: 23729 - RNA, 20 nt, Artificial Sequence
  HTT spacer sequence GTCN PAM
ucugcccgccuuggccuccc

SEQ ID NO: 23730 - RNA, 20 nt, Artificial Sequence
  HTT spacer sequence GTCN PAM
ggaguuugagaccagcuuga

SEQ ID NO: 23731 - RNA, 20 nt, Artificial Sequence
  HTT spacer sequence GTCN PAM
caaacuccugaccucagguc

SEQ ID NO: 23732 - RNA, 20 nt, Artificial Sequence
  HTT spacer sequence GTCN PAM
agcuggucucaaacuccuga

SEQ ID NO: 23733 - RNA, 20 nt, Artificial Sequence
  HTT spacer sequence GTCN PAM
caaaagaaaaaaaaaaaaua

SEQ ID NO: 23734 - RNA, 20 nt, Artificial Sequence
  HTT spacer sequence GTCN PAM
uggggcuggugggagugccu

SEQ ID NO: 23735 - RNA, 20 nt, Artificial Sequence
  HTT spacer sequence GTCN PAM
uugugaccuguaucuugugu

SEQ ID NO: 23736 - RNA, 20 nt, Artificial Sequence
  HTT spacer sequence GTCN PAM
caaagaccuuacugauaaaa

SEQ ID NO: 23737 - RNA, 20 nt, Artificial Sequence
  HTT spacer sequence GTCN PAM
gccuccuaccucauccugug

SEQ ID NO: 23738 - RNA, 20 nt, Artificial Sequence
  HTT spacer sequence GTCN PAM
caggaugagguaggaggcug

SEQ ID NO: 23739 - RNA, 20 nt, Artificial Sequence
  HTT spacer sequence GTCN PAM
gccucauuuuaccccgcccc

SEQ ID NO: 23740 - RNA, 20 nt, Artificial Sequence
  HTT spacer sequence GTCN PAM
gaggcguuggaaccagaaca

SEQ ID NO: 23741 - RNA, 20 nt, Artificial Sequence
  HTT spacer sequence GTCN PAM
ugcucugucacccaggcugg

SEQ ID NO: 23742 - RNA, 20 nt, Artificial Sequence
  HTT spacer sequence GTCN PAM
cccaggcuggagugcugugg

SEQ ID NO: 23743 - RNA, 20 nt, Artificial Sequence
  HTT spacer sequence GTCN PAM
cagcuacucgggaggcugag

SEQ ID NO: 23744 - RNA, 20 nt, Artificial Sequence
  HTT spacer sequence GTCN PAM
uugcagaugaaucguaaccu

SEQ ID NO: 23745 - RNA, 20 nt, Artificial Sequence
  HTT spacer sequence GTCN PAM
gccuaccuacuaugcuaggu

SEQ ID NO: 23746 - RNA, 20 nt, Artificial Sequence
  HTT spacer sequence GTCN PAM
cagccaguuccugcagccag

SEQ ID NO: 23747 - RNA, 20 nt, Artificial Sequence
  HTT spacer sequence GTCN PAM
ggcugcaggaacuggcugag

SEQ ID NO: 23748 - RNA, 20 nt, Artificial Sequence
  HTT spacer sequence GTCN PAM
auaaauuugcuuugaccaca

SEQ ID NO: 23749 - RNA, 20 nt, Artificial Sequence
  HTT spacer sequence GTCN PAM
aagcaaauuuauggacagaa

SEQ ID NO: 23750 - RNA, 20 nt, Artificial Sequence
  HTT spacer sequence GTCN PAM
cccugaaucugcugugauuc

SEQ ID NO: 23751 - RNA, 20 nt, Artificial Sequence
  HTT spacer sequence GTCN PAM
cagaaucacagcagauucag

SEQ ID NO: 23752 - RNA, 20 nt, Artificial Sequence
  HTT spacer sequence GTCN PAM
uuuuaaauggcuuuucagua

SEQ ID NO: 23753 - RNA, 20 nt, Artificial Sequence
  HTT spacer sequence GTCN PAM
aaaaauagaaaauugguaga

SEQ ID NO: 23754 - RNA, 20 nt, Artificial Sequence
  HTT spacer sequence GTCN PAM
caaaaaaagaaaaaaaaaau

SEQ ID NO: 23755 - RNA, 20 nt, Artificial Sequence
  HTT spacer sequence GTCN PAM
cgcuccgucacccaggcugg

SEQ ID NO: 23756 - RNA, 20 nt, Artificial Sequence
  HTT spacer sequence GTCN PAM
cccaggcuggagugcagugg

SEQ ID NO: 23757 - RNA, 20 nt, Artificial Sequence
  HTT spacer sequence GTCN PAM
ggcuggucucaaacuccuga

SEQ ID NO: 23758 - RNA, 20 nt, Artificial Sequence
  HTT spacer sequence GTCN PAM
caaacuccugaccucaggug

SEQ ID NO: 23759 - RNA, 20 nt, Artificial Sequence
  HTT spacer sequence GTCN PAM
ggaguuugagaccagccuga

SEQ ID NO: 23760 - RNA, 20 nt, Artificial Sequence
  HTT spacer sequence GTCN PAM
accugccuuggccucccaaa

SEQ ID NO: 23761 - RNA, 20 nt, Artificial Sequence
  HTT spacer sequence GTCN PAM
cuguguuuuuuguuuuuuuu

SEQ ID NO: 23762 - RNA, 20 nt, Artificial Sequence
  HTT spacer sequence GTCN PAM
caaaaaaaaaaacaaaaaac

SEQ ID NO: 23763 - RNA, 20 nt, Artificial Sequence
  HTT spacer sequence GTCN PAM
cauucauucugucacccagg

SEQ ID NO: 23764 - RNA, 20 nt, Artificial Sequence
  HTT spacer sequence GTCN PAM
cccaggcuggaguucagugg

SEQ ID NO: 23765 - RNA, 20 nt, Artificial Sequence
  HTT spacer sequence GTCN PAM
ccuggguuccagugauucuc

SEQ ID NO: 23766 - RNA, 20 nt, Artificial Sequence
  HTT spacer sequence GTCN PAM
gucuccugaguagcuguguu

SEQ ID NO: 23767 - RNA, 20 nt, Artificial Sequence
  HTT spacer sequence GTCN PAM
ccugaguagcuguguuccug

SEQ ID NO: 23768 - RNA, 20 nt, Artificial Sequence
  HTT spacer sequence GTCN PAM
uucgaugguuauuuaauacu

SEQ ID NO: 23769 - RNA, 20 nt, Artificial Sequence
  HTT spacer sequence GTCN PAM
uucaaaagauuuaacugugc

SEQ ID NO: 23770 - RNA, 20 nt, Artificial Sequence
  HTT spacer sequence GTCN PAM
cucuucagaaaagugauagg

SEQ ID NO: 23771 - RNA, 20 nt, Artificial Sequence
  HTT spacer sequence GTCN PAM
uagcaauuuuaagaaguccu

SEQ ID NO: 23772 - RNA, 20 nt, Artificial Sequence
  HTT spacer sequence GTCN PAM
ucauuucuacauuuccuuac

SEQ ID NO: 23773 - RNA, 20 nt, Artificial Sequence
  HTT spacer sequence GTCN PAM
cuucaaucuuuccucacacu

SEQ ID NO: 23774 - RNA, 20 nt, Artificial Sequence
  HTT spacer sequence GTCN PAM
acuacauuuacacauuuuaa

SEQ ID NO: 23775 - RNA, 20 nt, Artificial Sequence
  HTT spacer sequence GTCN PAM
cauuuaauuuagaaaguuua

SEQ ID NO: 23776 - RNA, 20 nt, Artificial Sequence
  HTT spacer sequence GTCN PAM
ucgguaagguuuucuuuuca

SEQ ID NO: 23777 - RNA, 20 nt, Artificial Sequence
  HTT spacer sequence GTCN PAM
gcagcucgauuuuacaggcu

SEQ ID NO: 23778 - RNA, 20 nt, Artificial Sequence
  HTT spacer sequence GTCN PAM
accaugugcacaguaaggag

SEQ ID NO: 23779 - RNA, 20 nt, Artificial Sequence
  HTT spacer sequence GTCN PAM
cccgaguagagaccaauuug

SEQ ID NO: 23780 - RNA, 20 nt, Artificial Sequence
  HTT spacer sequence GTCN PAM
cuacucgggggacacuaugu

SEQ ID NO: 23781 - RNA, 20 nt, Artificial Sequence
  HTT spacer sequence GTCN PAM
aaccaaucuuugggcccugu

SEQ ID NO: 23782 - RNA, 20 nt, Artificial Sequence
  HTT spacer sequence GTCN PAM
aauuuacacagggcccaaag

SEQ ID NO: 23783 - RNA, 20 nt, Artificial Sequence
  HTT spacer sequence GTCN PAM
auaaaacccuguccauucug

SEQ ID NO: 23784 - RNA, 20 nt, Artificial Sequence
  HTT spacer sequence GTCN PAM
auucugccgcaggcuggaag

SEQ ID NO: 23785 - RNA, 20 nt, Artificial Sequence
  HTT spacer sequence GTCN PAM
uccagccugcggcagaaugg

SEQ ID NO: 23786 - RNA, 20 nt, Artificial Sequence
  HTT spacer sequence GTCN PAM
ccuauagagagagaggggug

SEQ ID NO: 23787 - RNA, 20 nt, Artificial Sequence
  HTT spacer sequence GTCN PAM
cugaaguggcauaauaccca

SEQ ID NO: 23788 - RNA, 20 nt, Artificial Sequence
  HTT spacer sequence GTCN PAM
ucaggauuuccugaggcugu

SEQ ID NO: 23789 - RNA, 20 nt, Artificial Sequence
  HTT spacer sequence GTCN PAM
gggcacagcuugguuuuaua

SEQ ID NO: 23790 - RNA, 20 nt, Artificial Sequence
  HTT spacer sequence GTCN PAM
cccuaaaauguauaaaacca

SEQ ID NO: 23791 - RNA, 20 nt, Artificial Sequence
  HTT spacer sequence GTCN PAM
caugucucccuaaaauguau

SEQ ID NO: 23792 - RNA, 20 nt, Artificial Sequence
  HTT spacer sequence GTCN PAM
auucauauauguaagaagua

SEQ ID NO: 23793 - RNA, 20 nt, Artificial Sequence
  HTT spacer sequence GTCN PAM
agaaaggcggggacaacuug

SEQ ID NO: 23794 - RNA, 20 nt, Artificial Sequence
  HTT spacer sequence GTCN PAM
ccgccuuucuggacggaacc

SEQ ID NO: 23795 - RNA, 20 nt, Artificial Sequence
  HTT spacer sequence GTCN PAM
cagguagacaaaugguugca

SEQ ID NO: 23796 - RNA, 20 nt, Artificial Sequence
  HTT spacer sequence GTCN PAM
accugugaccuagaagcucu

SEQ ID NO: 23797 - RNA, 20 nt, Artificial Sequence
  HTT spacer sequence GTCN PAM
auugacugggcgcaguggcu

SEQ ID NO: 23798 - RNA, 20 nt, Artificial Sequence
  HTT spacer sequence GTCN PAM
auagacgcauauucugauug

SEQ ID NO: 23799 - RNA, 20 nt, Artificial Sequence
  HTT spacer sequence GTCN PAM
ggaguuugagagcagcccgg

SEQ ID NO: 23800 - RNA, 20 nt, Artificial Sequence
  HTT spacer sequence GTCN PAM
cuacuaaaaauacaaaaaau

SEQ ID NO: 23801 - RNA, 20 nt, Artificial Sequence
  HTT spacer sequence GTCN PAM
caaagucaggagauugagac

SEQ ID NO: 23802 - RNA, 20 nt, Artificial Sequence
  HTT spacer sequence GTCN PAM
ggagauugagaccauccugg

SEQ ID NO: 23803 - RNA, 20 nt, Artificial Sequence
  HTT spacer sequence GTCN PAM
caaucuccugacuuugugac

SEQ ID NO: 23804 - RNA, 20 nt, Artificial Sequence
  HTT spacer sequence GTCN PAM
cagcuacucggcaggcugag

SEQ ID NO: 23805 - RNA, 20 nt, Artificial Sequence
  HTT spacer sequence GTCN PAM
gggcuggagugcaguggugu

SEQ ID NO: 23806 - RNA, 20 nt, Artificial Sequence
  HTT spacer sequence GTCN PAM
uccgggcuggagugcagugg

SEQ ID NO: 23807 - RNA, 20 nt, Artificial Sequence
  HTT spacer sequence GTCN PAM
ugcccugucguccgggcugg

SEQ ID NO: 23808 - RNA, 20 nt, Artificial Sequence
  HTT spacer sequence GTCN PAM
uccuucugcucacugagaua

SEQ ID NO: 23809 - RNA, 20 nt, Artificial Sequence
  HTT spacer sequence GTCN PAM
cagcuacuugggaggcugag

SEQ ID NO: 23810 - RNA, 20 nt, Artificial Sequence
  HTT spacer sequence GTCN PAM
cacuauguguccaggcuggu

SEQ ID NO: 23811 - RNA, 20 nt, Artificial Sequence
  HTT spacer sequence GTCN PAM
aggcuggucuaaaaccccug

SEQ ID NO: 23812 - RNA, 20 nt, Artificial Sequence
  HTT spacer sequence GTCN PAM
aaaaccccugagcucaaaug

SEQ ID NO: 23813 - RNA, 20 nt, Artificial Sequence
  HTT spacer sequence GTCN PAM
ucccgccucagccucccgaa

SEQ ID NO: 23814 - RNA, 20 nt, Artificial Sequence
  HTT spacer sequence GTCN PAM
acauuuuuauaaauugcuaa

SEQ ID NO: 23815 - RNA, 20 nt, Artificial Sequence
  HTT spacer sequence GTCN PAM
ggugugagcccggacuucga

SEQ ID NO: 23816 - RNA, 20 nt, Artificial Sequence
  HTT spacer sequence GTCN PAM
gggcucacaccagaccucca

SEQ ID NO: 23817 - RNA, 20 nt, Artificial Sequence
  HTT spacer sequence GTCN PAM
aacaccuccccucugcggcc

SEQ ID NO: 23818 - RNA, 20 nt, Artificial Sequence
  HTT spacer sequence GTCN PAM
aggcggugaagcacaggccg

SEQ ID NO: 23819 - RNA, 20 nt, Artificial Sequence
  HTT spacer sequence GTCN PAM
cccuucggcucauucucgaa

SEQ ID NO: 23820 - RNA, 20 nt, Artificial Sequence
  HTT spacer sequence GTCN PAM
caaacuucacuucuccugug

SEQ ID NO: 23821 - RNA, 20 nt, Artificial Sequence
  HTT spacer sequence GTCN PAM
aagguccuggccccuuucuc

SEQ ID NO: 23822 - RNA, 20 nt, Artificial Sequence
  HTT spacer sequence GTCN PAM
uggccccuuucucuucugcu

SEQ ID NO: 23823 - RNA, 20 nt, Artificial Sequence
  HTT spacer sequence GTCN PAM
agagaaccgcacuuacccuc

SEQ ID NO: 23824 - RNA, 20 nt, Artificial Sequence
  HTT spacer sequence GTCN PAM
guucuaaugauaaagcagag

SEQ ID NO: 23825 - RNA, 20 nt, Artificial Sequence
  HTT spacer sequence GTCN PAM
ugggaaaccgcaagagucug

SEQ ID NO: 23826 - RNA, 20 nt, Artificial Sequence
  HTT spacer sequence GTCN PAM
agcagaagcacagcccacau

SEQ ID NO: 23827 - RNA, 20 nt, Artificial Sequence
  HTT spacer sequence GTCN PAM
uuccugagcaagaacucuaa

SEQ ID NO: 23828 - RNA, 20 nt, Artificial Sequence
  HTT spacer sequence GTCN PAM
caguccaaccggaccuuuua

SEQ ID NO: 23829 - RNA, 20 nt, Artificial Sequence
  HTT spacer sequence GTCN PAM
aaccggaccuuuuacuaaag

SEQ ID NO: 23830 - RNA, 20 nt, Artificial Sequence
  HTT spacer sequence GTCN PAM
gguuggacugggacauaggu

SEQ ID NO: 23831 - RNA, 20 nt, Artificial Sequence
  HTT spacer sequence GTCN PAM
ucccugggguuggagccuuu

SEQ ID NO: 23832 - RNA, 20 nt, Artificial Sequence
  HTT spacer sequence GTCN PAM
gagacacgacguagccuuca

SEQ ID NO: 23833 - RNA, 20 nt, Artificial Sequence
  HTT spacer sequence GTCN PAM
ccgacccccuacuaaaggcu

SEQ ID NO: 23834 - RNA, 20 nt, Artificial Sequence
  HTT spacer sequence GTCN PAM
ugucuccgacccccuacuaa

SEQ ID NO: 23835 - RNA, 20 nt, Artificial Sequence
  HTT spacer sequence GTCN PAM
ugaaggcuacgucgugucuc

SEQ ID NO: 23836 - RNA, 20 nt, Artificial Sequence
  HTT spacer sequence GTCN PAM
aguuacacgaucccuguaag

SEQ ID NO: 23837 - RNA, 20 nt, Artificial Sequence
  HTT spacer sequence GTCN PAM
guugaaguaagugcuacaaa

SEQ ID NO: 23838 - RNA, 20 nt, Artificial Sequence
  HTT spacer sequence GTCN PAM
cgagggaaagaaagucagcg

SEQ ID NO: 23839 - RNA, 20 nt, Artificial Sequence
  HTT spacer sequence GTCN PAM
gcguggcuugggaguuggga

SEQ ID NO: 23840 - RNA, 20 nt, Artificial Sequence
  HTT spacer sequence GTCN PAM
ugcugcucccaacucccaag

SEQ ID NO: 23841 - RNA, 20 nt, Artificial Sequence
  HTT spacer sequence GTCN PAM
uaagauaucuugagccacug

SEQ ID NO: 23842 - RNA, 20 nt, Artificial Sequence
  HTT spacer sequence GTCN PAM
uacaagaaccaggcagcccu

SEQ ID NO: 23843 - RNA, 20 nt, Artificial Sequence
  HTT spacer sequence GTCN PAM
uccuacaagaaccaggcagc

SEQ ID NO: 23844 - RNA, 20 nt, Artificial Sequence
  HTT spacer sequence GTCN PAM
gucuaucugucaguggcaga

SEQ ID NO: 23845 - RNA, 20 nt, Artificial Sequence
  HTT spacer sequence GTCN PAM
aucugucaguggcagagcca

SEQ ID NO: 23846 - RNA, 20 nt, Artificial Sequence
  HTT spacer sequence GTCN PAM
guggcagagccagccuugga

SEQ ID NO: 23847 - RNA, 20 nt, Artificial Sequence
  HTT spacer sequence GTCN PAM
cugcacuggccaggcaugca

SEQ ID NO: 23848 - RNA, 20 nt, Artificial Sequence
  HTT spacer sequence GTCN PAM
agugcuacugaacagaaugu

SEQ ID NO: 23849 - RNA, 20 nt, Artificial Sequence
  HTT spacer sequence GTCN PAM
caucuagauggggccuucug

SEQ ID NO: 23850 - RNA, 20 nt, Artificial Sequence
  HTT spacer sequence GTCN PAM
ugccccaccagcucugucuc

SEQ ID NO: 23851 - RNA, 20 nt, Artificial Sequence
  HTT spacer sequence GTCN PAM
uuguccugccccaccagcuc

SEQ ID NO: 23852 - RNA, 20 nt, Artificial Sequence
  HTT spacer sequence GTCN PAM
caagaagcccccucucucca

SEQ ID NO: 23853 - RNA, 20 nt, Artificial Sequence
  HTT spacer sequence GTCN PAM
ccugggagggaugaggccac

SEQ ID NO: 23854 - RNA, 20 nt, Artificial Sequence
  HTT spacer sequence GTCN PAM
cuaauucuuucuugcagcag

SEQ ID NO: 23855 - RNA, 20 nt, Artificial Sequence
  HTT spacer sequence GTCN PAM
ugaacucuuggccucaagca

SEQ ID NO: 23856 - RNA, 20 nt, Artificial Sequence
  HTT spacer sequence GTCN PAM
auaaucccagcgcuugggga

SEQ ID NO: 23857 - RNA, 20 nt, Artificial Sequence
  HTT spacer sequence GTCN PAM
gcacccaguuccugccacag

SEQ ID NO: 23858 - RNA, 20 nt, Artificial Sequence
  HTT spacer sequence GTCN PAM
ccucauuagaacaaaagaug

SEQ ID NO: 23859 - RNA, 20 nt, Artificial Sequence
  HTT spacer sequence GTCN PAM
caacugcucaggaggcugag

SEQ ID NO: 23860 - RNA, 20 nt, Artificial Sequence
  HTT spacer sequence GTCN PAM
cugcuaaaaauacaaaaauu

SEQ ID NO: 23861 - RNA, 20 nt, Artificial Sequence
  HTT spacer sequence GTCN PAM
uuuggccaggcacgguggcu

SEQ ID NO: 23862 - RNA, 20 nt, Artificial Sequence
  HTT spacer sequence GTCN PAM
aagugcuacccuucaaaaaa

SEQ ID NO: 23863 - RNA, 20 nt, Artificial Sequence
  HTT spacer sequence GTCN PAM
gauuguuugagccugguguu

SEQ ID NO: 23864 - RNA, 20 nt, Artificial Sequence
  HTT spacer sequence GTCN PAM
ggaauauuucaagcccauuc

SEQ ID NO: 23865 - RNA, 20 nt, Artificial Sequence
  HTT spacer sequence GTCN PAM
uuauaagauuuugguaucaa

SEQ ID NO: 23866 - RNA, 20 nt, Artificial Sequence
  HTT spacer sequence GTCN PAM
gguaauacuuuauuaagggu

SEQ ID NO: 23867 - RNA, 20 nt, Artificial Sequence
  HTT spacer sequence GTCN PAM
caucauaacauagugggguu

SEQ ID NO: 23868 - RNA, 20 nt, Artificial Sequence
  HTT spacer sequence GTCN PAM
aaugccuuuacagcaucuau

SEQ ID NO: 23869 - RNA, 20 nt, Artificial Sequence
  HTT spacer sequence GTCN PAM
auaaaauaaauuaguuacuc

SEQ ID NO: 23870 - RNA, 20 nt, Artificial Sequence
  HTT spacer sequence GTCN PAM
caaaaaaaaaaaagaagaaa

SEQ ID NO: 23871 - RNA, 20 nt, Artificial Sequence
  HTT spacer sequence GTCN PAM
ugcucuguugccaggcugga

SEQ ID NO: 23872 - RNA, 20 nt, Artificial Sequence
  HTT spacer sequence GTCN PAM
cagcuacucgggaggcugag

SEQ ID NO: 23873 - RNA, 20 nt, Artificial Sequence
  HTT spacer sequence GTCN PAM
ggcuggucuugaacucccaa

SEQ ID NO: 23874 - RNA, 20 nt, Artificial Sequence
  HTT spacer sequence GTCN PAM
ugaacucccaaccucacgua

SEQ ID NO: 23875 - RNA, 20 nt, Artificial Sequence
  HTT spacer sequence GTCN PAM
auaagcaucaguauuaagga

SEQ ID NO: 23876 - RNA, 20 nt, Artificial Sequence
  HTT spacer sequence GTCN PAM
gagcauagcuaaggcaggcu

SEQ ID NO: 23877 - RNA, 20 nt, Artificial Sequence
  HTT spacer sequence GTCN PAM
gugucugagcauagcuaagg

SEQ ID NO: 23878 - RNA, 20 nt, Artificial Sequence
  HTT spacer sequence GTCN PAM
gccuacaauuggcaaaauca

SEQ ID NO: 23879 - RNA, 20 nt, Artificial Sequence
  HTT spacer sequence GTCN PAM
acugcagagcaucugcuguu

SEQ ID NO: 23880 - RNA, 20 nt, Artificial Sequence
  HTT spacer sequence GTCN PAM
caagggcaaacagcagaugc

SEQ ID NO: 23881 - RNA, 20 nt, Artificial Sequence
  HTT spacer sequence GTCN PAM
ugugaagcugggaagcuccc

SEQ ID NO: 23882 - RNA, 20 nt, Artificial Sequence
  HTT spacer sequence GTCN PAM
aaaaauuuuaguugaaccag

SEQ ID NO: 23883 - RNA, 20 nt, Artificial Sequence
  HTT spacer sequence GTCN PAM
caaacuuaggcugguucaac

SEQ ID NO: 23884 - RNA, 20 nt, Artificial Sequence
  HTT spacer sequence GTCN PAM
ucaauguacauggaaguucc

SEQ ID NO: 23885 - RNA, 20 nt, Artificial Sequence
  HTT spacer sequence GTCN PAM
gucaucaauguacauggaag

SEQ ID NO: 23886 - RNA, 20 nt, Artificial Sequence
  HTT spacer sequence GTCN PAM
ggauuuauucauuauguuca

SEQ ID NO: 23887 - RNA, 20 nt, Artificial Sequence
  HTT spacer sequence GTCN PAM
agaucagcaaauacccgcaa

SEQ ID NO: 23888 - RNA, 20 nt, Artificial Sequence
  HTT spacer sequence GTCN PAM
cacucuguugccaggcugga

SEQ ID NO: 23889 - RNA, 20 nt, Artificial Sequence
  HTT spacer sequence GTCN PAM
cuacuaaaauuacaaaaauc

SEQ ID NO: 23890 - RNA, 20 nt, Artificial Sequence
  HTT spacer sequence GTCN PAM
cgaucucuugacgucaugau

SEQ ID NO: 23891 - RNA, 20 nt, Artificial Sequence
  HTT spacer sequence GTCN PAM
agagaucgagaccauccugg

SEQ ID NO: 23892 - RNA, 20 nt, Artificial Sequence
  HTT spacer sequence GTCN PAM
ugaucuguccaccucggccu

SEQ ID NO: 23893 - RNA, 20 nt, Artificial Sequence
  HTT spacer sequence GTCN PAM
accucggccucccaaagugc

SEQ ID NO: 23894 - RNA, 20 nt, Artificial Sequence
  HTT spacer sequence GTCN PAM
cgccuauaaucccagcacuu

SEQ ID NO: 23895 - RNA, 20 nt, Artificial Sequence
  HTT spacer sequence GTCN PAM
gagcuaagccucuugagcau

SEQ ID NO: 23896 - RNA, 20 nt, Artificial Sequence
  HTT spacer sequence GTCN PAM
ccuaugcucaagaggcuuag

SEQ ID NO: 23897 - RNA, 20 nt, Artificial Sequence
  HTT spacer sequence GTCN PAM
caggcaauuccuuuccacuu

SEQ ID NO: 23898 - RNA, 20 nt, Artificial Sequence
  HTT spacer sequence GTCN PAM
acuuugggguccaccccacc

SEQ ID NO: 23899 - RNA, 20 nt, Artificial Sequence
  HTT spacer sequence GTCN PAM
accccacccaagaagaagga

SEQ ID NO: 23900 - RNA, 20 nt, Artificial Sequence
  HTT spacer sequence GTCN PAM
uccuucuucuuggguggggu

SEQ ID NO: 23901 - RNA, 20 nt, Artificial Sequence
  HTT spacer sequence GTCN PAM
ucugggaccauaccaauccc

SEQ ID NO: 23902 - RNA, 20 nt, Artificial Sequence
  HTT spacer sequence GTCN PAM
cagaggaccauccauauuuc

SEQ ID NO: 23903 - RNA, 20 nt, Artificial Sequence
  HTT spacer sequence GTCN PAM
uaggccaucuuaauccaagu

SEQ ID NO: 23904 - RNA, 20 nt, Artificial Sequence
  HTT spacer sequence GTCN PAM
caggagccuggcauugcaaa

SEQ ID NO: 23905 - RNA, 20 nt, Artificial Sequence
  HTT spacer sequence GTCN PAM
uuugaagcuuaagguauuau

SEQ ID NO: 23906 - RNA, 20 nt, Artificial Sequence
  HTT spacer sequence GTCN PAM
agcacacaaacacaaauuac

SEQ ID NO: 23907 - RNA, 20 nt, Artificial Sequence
  HTT spacer sequence GTCN PAM
agauaauggagauaugaaau

SEQ ID NO: 23908 - RNA, 20 nt, Artificial Sequence
  HTT spacer sequence GTCN PAM
guauuucauaucuccauuau

SEQ ID NO: 23909 - RNA, 20 nt, Artificial Sequence
  HTT spacer sequence GTCN PAM
cauuuuauaguuucugauuu

SEQ ID NO: 23910 - RNA, 20 nt, Artificial Sequence
  HTT spacer sequence GTCN PAM
guauaaauuacggucccgaa

SEQ ID NO: 23911 - RNA, 20 nt, Artificial Sequence
  HTT spacer sequence GTCN PAM
cgaaaacugcagaauuccag

SEQ ID NO: 23912 - RNA, 20 nt, Artificial Sequence
  HTT spacer sequence GTCN PAM
gaugacacuacccagaauaa

SEQ ID NO: 23913 - RNA, 20 nt, Artificial Sequence
  HTT spacer sequence GTCN PAM
ucugacuuacuuccuaguuc

SEQ ID NO: 23914 - RNA, 20 nt, Artificial Sequence
  HTT spacer sequence GTCN PAM
uugaaacacggcuucuguuc

SEQ ID NO: 23915 - RNA, 20 nt, Artificial Sequence
  HTT spacer sequence GTCN PAM
ccguccuugaaacacggcuu

SEQ ID NO: 23916 - RNA, 20 nt, Artificial Sequence
  HTT spacer sequence GTCN PAM
agacaaugacaaacaccauc

SEQ ID NO: 23917 - RNA, 20 nt, Artificial Sequence
  HTT spacer sequence GTCN PAM
ggacuugcuuucacaguaug

SEQ ID NO: 23918 - RNA, 20 nt, Artificial Sequence
  HTT spacer sequence GTCN PAM
uugucuggacuugcuuucac

SEQ ID NO: 23919 - RNA, 20 nt, Artificial Sequence
  HTT spacer sequence GTCN PAM
uguguauuguugaugguguu

SEQ ID NO: 23920 - RNA, 20 nt, Artificial Sequence
  HTT spacer sequence GTCN PAM
ccauuaaaugcaucuuaugc

SEQ ID NO: 23921 - RNA, 20 nt, Artificial Sequence
  HTT spacer sequence GTCN PAM
cuggcccugggaugaugaga

SEQ ID NO: 23922 - RNA, 20 nt, Artificial Sequence
  HTT spacer sequence GTCN PAM
caccuuagggaguucacuag

SEQ ID NO: 23923 - RNA, 20 nt, Artificial Sequence
  HTT spacer sequence GTCN PAM
uucuggguauuuguagggaa

SEQ ID NO: 23924 - RNA, 20 nt, Artificial Sequence
  HTT spacer sequence GTCN PAM
uugcuggugaaaagaacauc

SEQ ID NO: 23925 - RNA, 20 nt, Artificial Sequence
  HTT spacer sequence GTCN PAM
ggauguucuuuucaccagca

SEQ ID NO: 23926 - RNA, 20 nt, Artificial Sequence
  HTT spacer sequence GTCN PAM
ccuuugguaaccuagcaaca

SEQ ID NO: 23927 - RNA, 20 nt, Artificial Sequence
  HTT spacer sequence GTCN PAM
gcuuguuggccagauggccc

SEQ ID NO: 23928 - RNA, 20 nt, Artificial Sequence
  HTT spacer sequence GTCN PAM
cuccuuacacccccagacgu

SEQ ID NO: 23929 - RNA, 20 nt, Artificial Sequence
  HTT spacer sequence GTCN PAM
ggggguguaaggagagacaa

SEQ ID NO: 23930 - RNA, 20 nt, Artificial Sequence
  HTT spacer sequence GTCN PAM
uugguuuucuguaguuuugc

SEQ ID NO: 23931 - RNA, 20 nt, Artificial Sequence
  HTT spacer sequence GTCN PAM
auuucauggcugcugcuuug

SEQ ID NO: 23932 - RNA, 20 nt, Artificial Sequence
  HTT spacer sequence GTCN PAM
caacagcaagaaugaaaagu

SEQ ID NO: 23933 - RNA, 20 nt, Artificial Sequence
  HTT spacer sequence GTCN PAM
uccacuuuucauucuugcug

SEQ ID NO: 23934 - RNA, 20 nt, Artificial Sequence
  HTT spacer sequence GTCN PAM
ggagaccaagaccauccugg

SEQ ID NO: 23935 - RNA, 20 nt, Artificial Sequence
  HTT spacer sequence GTCN PAM
ccugaccucgugauccaccc

SEQ ID NO: 23936 - RNA, 20 nt, Artificial Sequence
  HTT spacer sequence GTCN PAM
uggucuccugaccucgugau

SEQ ID NO: 23937 - RNA, 20 nt, Artificial Sequence
  HTT spacer sequence GTCN PAM
cuacuaaaaauacaaaaaaa

SEQ ID NO: 23938 - RNA, 20 nt, Artificial Sequence
  HTT spacer sequence GTCN PAM
ggcaugguggugggugccug

SEQ ID NO: 23939 - RNA, 20 nt, Artificial Sequence
  HTT spacer sequence GTCN PAM
cagcuacucgggaggcugag

SEQ ID NO: 23940 - RNA, 20 nt, Artificial Sequence
  HTT spacer sequence GTCN PAM
cccaggcuggagugcagugg

SEQ ID NO: 23941 - RNA, 20 nt, Artificial Sequence
  HTT spacer sequence GTCN PAM
ugcucugucacccaggcugg

SEQ ID NO: 23942 - RNA, 20 nt, Artificial Sequence
  HTT spacer sequence GTCN PAM
caaaaaaaaaaaaaaaaaaa

SEQ ID NO: 23943 - RNA, 20 nt, Artificial Sequence
  HTT spacer sequence GTCN PAM
cccuuuuuuuuuuuuuuuuu

SEQ ID NO: 23944 - RNA, 20 nt, Artificial Sequence
  HTT spacer sequence GTCN PAM
ucuauugcggaaaucuuucc

SEQ ID NO: 23945 - RNA, 20 nt, Artificial Sequence
  HTT spacer sequence GTCN PAM
aaggaauucuaaaggaugcu

SEQ ID NO: 23946 - RNA, 20 nt, Artificial Sequence
  HTT spacer sequence GTCN PAM
uuuucuucugccuggaaagc

SEQ ID NO: 23947 - RNA, 20 nt, Artificial Sequence
  HTT spacer sequence GTCN PAM
gcuuuuguuuaaauuggccc

SEQ ID NO: 23948 - RNA, 20 nt, Artificial Sequence
  HTT spacer sequence GTCN PAM
cuaucuuuuguaacauauau

SEQ ID NO: 23949 - RNA, 20 nt, Artificial Sequence
  HTT spacer sequence GTCN PAM
agauggauucucacucuguc

SEQ ID NO: 23950 - RNA, 20 nt, Artificial Sequence
  HTT spacer sequence GTCN PAM
cccaggcuacagugaaaugg

SEQ ID NO: 23951 - RNA, 20 nt, Artificial Sequence
  HTT spacer sequence GTCN PAM
cggcucacugcaaccucugc

SEQ ID NO: 23952 - RNA, 20 nt, Artificial Sequence
  HTT spacer sequence GTCN PAM
ugaacaccugaccucaggug

SEQ ID NO: 23953 - RNA, 20 nt, Artificial Sequence
  HTT spacer sequence GTCN PAM
gguguucaagaccagccugg

SEQ ID NO: 23954 - RNA, 20 nt, Artificial Sequence
  HTT spacer sequence GTCN PAM
cccuagaaauuacaacauuc

SEQ ID NO: 23955 - RNA, 20 nt, Artificial Sequence
  HTT spacer sequence GTCN PAM
ccucuuuucauggucacccu

SEQ ID NO: 23956 - RNA, 20 nt, Artificial Sequence
  HTT spacer sequence GTCN PAM
cacuuugucacccaggcugg

SEQ ID NO: 23957 - RNA, 20 nt, Artificial Sequence
  HTT spacer sequence GTCN PAM
cccaggcuggaguguugugg

SEQ ID NO: 23958 - RNA, 20 nt, Artificial Sequence
  HTT spacer sequence GTCN PAM
ugaacuccugaccucaggcg

SEQ ID NO: 23959 - RNA, 20 nt, Artificial Sequence
  HTT spacer sequence GTCN PAM
ggaguucaagaccagccugg

SEQ ID NO: 23960 - RNA, 20 nt, Artificial Sequence
  HTT spacer sequence GTCN PAM
gauuuuauuuuugaaccucu

SEQ ID NO: 23961 - RNA, 20 nt, Artificial Sequence
  HTT spacer sequence GTCN PAM
uucuguauauccuaccagcu

SEQ ID NO: 23962 - RNA, 20 nt, Artificial Sequence
  HTT spacer sequence GTCN PAM
gucuuucuguauauccuacc

SEQ ID NO: 23963 - RNA, 20 nt, Artificial Sequence
  HTT spacer sequence GTCN PAM
aagaccccacauaagaagcu

SEQ ID NO: 23964 - RNA, 20 nt, Artificial Sequence
  HTT spacer sequence GTCN PAM
uugacaacccucguuuuuaa

SEQ ID NO: 23965 - RNA, 20 nt, Artificial Sequence
  HTT spacer sequence GTCN PAM
uguuuccuuagguucuaggu

SEQ ID NO: 23966 - RNA, 20 nt, Artificial Sequence
  HTT spacer sequence GTCN PAM
uccuucaucuguccuguuuc

SEQ ID NO: 23967 - RNA, 20 nt, Artificial Sequence
  HTT spacer sequence GTCN PAM
ugcgccucagccauccuaug

SEQ ID NO: 23968 - RNA, 20 nt, Artificial Sequence
  HTT spacer sequence GTCN PAM
cauaggauggcugaggcgca

SEQ ID NO: 23969 - RNA, 20 nt, Artificial Sequence
  HTT spacer sequence GTCN PAM
gcagcugggcccgugcucuu

SEQ ID NO: 23970 - RNA, 20 nt, Artificial Sequence
  HTT spacer sequence GTCN PAM
agcaacuggagagcagagga

SEQ ID NO: 23971 - RNA, 20 nt, Artificial Sequence
  HTT spacer sequence GTCN PAM
gcgucaggguuuccuucuuu

SEQ ID NO: 23972 - RNA, 20 nt, Artificial Sequence
  HTT spacer sequence GTCN PAM
ggguuuccuucuuuuccagc

SEQ ID NO: 23973 - RNA, 20 nt, Artificial Sequence
  HTT spacer sequence GTCN PAM
cgggucggggcugcucccgc

SEQ ID NO: 23974 - RNA, 20 nt, Artificial Sequence
  HTT spacer sequence GTCN PAM
gggcugcucccgcuuacugc

SEQ ID NO: 23975 - RNA, 20 nt, Artificial Sequence
  HTT spacer sequence GTCN PAM
ugccgagaagagagaagagg

SEQ ID NO: 23976 - RNA, 20 nt, Artificial Sequence
  HTT spacer sequence GTCN PAM
ugcuuagcuccccgcccagu

SEQ ID NO: 23977 - RNA, 20 nt, Artificial Sequence
  HTT spacer sequence GTCN PAM
cugcuaugacuuggugacua

SEQ ID NO: 23978 - RNA, 20 nt, Artificial Sequence
  HTT spacer sequence GTCN PAM
uagcagugacucucucuggg

SEQ ID NO: 23979 - RNA, 20 nt, Artificial Sequence
  HTT spacer sequence GTCN PAM
ccaagucauagcagugacuc

SEQ ID NO: 23980 - RNA, 20 nt, Artificial Sequence
  HTT spacer sequence GTCN PAM
caaaaaaaaaaaaaagagcg

SEQ ID NO: 23981 - RNA, 20 nt, Artificial Sequence
  HTT spacer sequence GTCN PAM
ugcucugucacccaggcugg

SEQ ID NO: 23982 - RNA, 20 nt, Artificial Sequence
  HTT spacer sequence GTCN PAM
cccaggcuggagugcagugg

SEQ ID NO: 23983 - RNA, 20 nt, Artificial Sequence
  HTT spacer sequence GTCN PAM
ggcggacuugaacuccugac

SEQ ID NO: 23984 - RNA, 20 nt, Artificial Sequence
  HTT spacer sequence GTCN PAM
gccugaccaacaagaugaaa

SEQ ID NO: 23985 - RNA, 20 nt, Artificial Sequence
  HTT spacer sequence GTCN PAM
ggaguucaaguccgccugac

SEQ ID NO: 23986 - RNA, 20 nt, Artificial Sequence
  HTT spacer sequence GTCN PAM
cccauucuaaagaaaaaaca

SEQ ID NO: 23987 - RNA, 20 nt, Artificial Sequence
  HTT spacer sequence GTCN PAM
gcuagcauguuguaagccuu

SEQ ID NO: 23988 - RNA, 20 nt, Artificial Sequence
  HTT spacer sequence GTCN PAM
caagugcucaucuggaacag

SEQ ID NO: 23989 - RNA, 20 nt, Artificial Sequence
  HTT spacer sequence GTCN PAM
uuagaauccuguuccagaug

SEQ ID NO: 23990 - RNA, 20 nt, Artificial Sequence
  HTT spacer sequence GTCN PAM
uaaguguugcuauaauaaau

SEQ ID NO: 23991 - RNA, 20 nt, Artificial Sequence
  HTT spacer sequence GTCN PAM
ggcaugugugaucaaugauu

SEQ ID NO: 23992 - RNA, 20 nt, Artificial Sequence
  HTT spacer sequence GTCN PAM
cugaacagcaaaaacauuuc

SEQ ID NO: 23993 - RNA, 20 nt, Artificial Sequence
  HTT spacer sequence GTCN PAM
cugaggccuaaaaaugggca

SEQ ID NO: 23994 - RNA, 20 nt, Artificial Sequence
  HTT spacer sequence GTCN PAM
ggcauggugucucugaggcc

SEQ ID NO: 23995 - RNA, 20 nt, Artificial Sequence
  HTT spacer sequence GTCN PAM
ugacaguccauuucuguaag

SEQ ID NO: 23996 - RNA, 20 nt, Artificial Sequence
  HTT spacer sequence GTCN PAM
agacacagguuuuuaaaguu

SEQ ID NO: 23997 - RNA, 20 nt, Artificial Sequence
  HTT spacer sequence GTCN PAM
auuucuguaagucuuucaca

SEQ ID NO: 23998 - RNA, 20 nt, Artificial Sequence
  HTT spacer sequence GTCN PAM
uucacauuagauuuccuguc

SEQ ID NO: 23999 - RNA, 20 nt, Artificial Sequence
  HTT spacer sequence GTCN PAM
ggaugauagucaauucuagg

SEQ ID NO: 24000 - RNA, 20 nt, Artificial Sequence
  HTT spacer sequence GTCN PAM
auucuaggcagaugauguuu

SEQ ID NO: 24001 - RNA, 20 nt, Artificial Sequence
  HTT spacer sequence GTCN PAM
cgaugauccauugccucccu

SEQ ID NO: 24002 - RNA, 20 nt, Artificial Sequence
  HTT spacer sequence GTCN PAM
uucuguuauaugcucccaaa

SEQ ID NO: 24003 - RNA, 20 nt, Artificial Sequence
  HTT spacer sequence GTCN PAM
cagcagcucagacggaagug

SEQ ID NO: 24004 - RNA, 20 nt, Artificial Sequence
  HTT spacer sequence GTCN PAM
gagcugcugugacuccaggu

SEQ ID NO: 24005 - RNA, 20 nt, Artificial Sequence
  HTT spacer sequence GTCN PAM
uuccagccuggccuggaauu

SEQ ID NO: 24006 - RNA, 20 nt, Artificial Sequence
  HTT spacer sequence GTCN PAM
ucugggcccccuccuuccag

SEQ ID NO: 24007 - RNA, 20 nt, Artificial Sequence
  HTT spacer sequence GTCN PAM
cagccaacacaucccauucc

SEQ ID NO: 24008 - RNA, 20 nt, Artificial Sequence
  HTT spacer sequence GTCN PAM
uucccuucauuuuaugugau

SEQ ID NO: 24009 - RNA, 20 nt, Artificial Sequence
  HTT spacer sequence GTCN PAM
uuccuucagcuagcuauggc

SEQ ID NO: 24010 - RNA, 20 nt, Artificial Sequence
  HTT spacer sequence GTCN PAM
cuguccuuccuucagcuagc

SEQ ID NO: 24011 - RNA, 20 nt, Artificial Sequence
  HTT spacer sequence GTCN PAM
uacacuagcuaagaggcaaa

SEQ ID NO: 24012 - RNA, 20 nt, Artificial Sequence
  HTT spacer sequence GTCN PAM
cuaaagaaggucagagcggc

SEQ ID NO: 24013 - RNA, 20 nt, Artificial Sequence
  HTT spacer sequence GTCN PAM
gagcggcugcuagggugcaa

SEQ ID NO: 24014 - RNA, 20 nt, Artificial Sequence
  HTT spacer sequence GTCN PAM
cauaacaauaaguaauagag

SEQ ID NO: 24015 - RNA, 20 nt, Artificial Sequence
  HTT spacer sequence GTCN PAM
cucauucagguugauguccu

SEQ ID NO: 24016 - RNA, 20 nt, Artificial Sequence
  HTT spacer sequence GTCN PAM
uaagccccagaaccucagaa

SEQ ID NO: 24017 - RNA, 20 nt, Artificial Sequence
  HTT spacer sequence GTCN PAM
ccaaauacaaucccauucug

SEQ ID NO: 24018 - RNA, 20 nt, Artificial Sequence
  HTT spacer sequence GTCN PAM
gauuauggcccacccuaaug

SEQ ID NO: 24019 - RNA, 20 nt, Artificial Sequence
  HTT spacer sequence GTCN PAM
uacaagaagagauuaggaca

SEQ ID NO: 24020 - RNA, 20 nt, Artificial Sequence
  HTT spacer sequence GTCN PAM
uaaucucuucuuguaagaca

SEQ ID NO: 24021 - RNA, 20 nt, Artificial Sequence
  HTT spacer sequence GTCN PAM
guguccuaaucucuucuugu

SEQ ID NO: 24022 - RNA, 20 nt, Artificial Sequence
  HTT spacer sequence GTCN PAM
cucugagcauguccgugucc

SEQ ID NO: 24023 - RNA, 20 nt, Artificial Sequence
  HTT spacer sequence GTCN PAM
ucacguggccgucccucuga

SEQ ID NO: 24024 - RNA, 20 nt, Artificial Sequence
  HTT spacer sequence GTCN PAM
gcaagucaaggacagggcuc

SEQ ID NO: 24025 - RNA, 20 nt, Artificial Sequence
  HTT spacer sequence GTCN PAM
aggacagggcucaggggaaa

SEQ ID NO: 24026 - RNA, 20 nt, Artificial Sequence
  HTT spacer sequence GTCN PAM
uugacuugcagacagcugcc

SEQ ID NO: 24027 - RNA, 20 nt, Artificial Sequence
  HTT spacer sequence GTCN PAM
gagaugaagguguuggcaag

SEQ ID NO: 24028 - RNA, 20 nt, Artificial Sequence
  HTT spacer sequence GTCN PAM
uagaggcuagaaguccgaga

SEQ ID NO: 24029 - RNA, 20 nt, Artificial Sequence
  HTT spacer sequence GTCN PAM
gugguacuuuguuauggcag

SEQ ID NO: 24030 - RNA, 20 nt, Artificial Sequence
  HTT spacer sequence GTCN PAM
ucugcugcuggaacaaauca

SEQ ID NO: 24031 - RNA, 20 nt, Artificial Sequence
  HTT spacer sequence GTCN PAM
agucauagaguuauauguag

SEQ ID NO: 24032 - RNA, 20 nt, Artificial Sequence
  HTT spacer sequence GTCN PAM
uagaguuauauguaguuacg

SEQ ID NO: 24033 - RNA, 20 nt, Artificial Sequence
  HTT spacer sequence GTCN PAM
cacguucugugggucaggaa

SEQ ID NO: 24034 - RNA, 20 nt, Artificial Sequence
  HTT spacer sequence GTCN PAM
ggaauuuggacccagcuuaa

SEQ ID NO: 24035 - RNA, 20 nt, Artificial Sequence
  HTT spacer sequence GTCN PAM
aaauuccugacccacagaac

SEQ ID NO: 24036 - RNA, 20 nt, Artificial Sequence
  HTT spacer sequence GTCN PAM
aauaccagcugccucccacc

SEQ ID NO: 24037 - RNA, 20 nt, Artificial Sequence
  HTT spacer sequence GTCN PAM
cuuuccaaucucacguggug

SEQ ID NO: 24038 - RNA, 20 nt, Artificial Sequence
  HTT spacer sequence GTCN PAM
agcaggccaugaggaacugg

SEQ ID NO: 24039 - RNA, 20 nt, Artificial Sequence
  HTT spacer sequence GTCN PAM
ucgccaugugggccucucca

SEQ ID NO: 24040 - RNA, 20 nt, Artificial Sequence
  HTT spacer sequence GTCN PAM
gcugccauguuggagaggcc

SEQ ID NO: 24041 - RNA, 20 nt, Artificial Sequence
  HTT spacer sequence GTCN PAM
cccuggcccucucuguugcc

SEQ ID NO: 24042 - RNA, 20 nt, Artificial Sequence
  HTT spacer sequence GTCN PAM
uacccuuuugcgaccuaguc

SEQ ID NO: 24043 - RNA, 20 nt, Artificial Sequence
  HTT spacer sequence GTCN PAM
caaaaggguaugacuucagu

SEQ ID NO: 24044 - RNA, 20 nt, Artificial Sequence
  HTT spacer sequence GTCN PAM
uggggugacauuccaucacc

SEQ ID NO: 24045 - RNA, 20 nt, Artificial Sequence
  HTT spacer sequence GTCN PAM
ccccaugacuaggucgcaaa

SEQ ID NO: 24046 - RNA, 20 nt, Artificial Sequence
  HTT spacer sequence GTCN PAM
uacaagggugucaauaccag

SEQ ID NO: 24047 - RNA, 20 nt, Artificial Sequence
  HTT spacer sequence GTCN PAM
auaccaggaggugaggggug

SEQ ID NO: 24048 - RNA, 20 nt, Artificial Sequence
  HTT spacer sequence GTCN PAM
gcccacugagguaacuaaca

SEQ ID NO: 24049 - RNA, 20 nt, Artificial Sequence
  HTT spacer sequence GTCN PAM
ggccucaagguuguuaguua

SEQ ID NO: 24050 - RNA, 20 nt, Artificial Sequence
  HTT spacer sequence GTCN PAM
acugugucaggccucaaggu

SEQ ID NO: 24051 - RNA, 20 nt, Artificial Sequence
  HTT spacer sequence GTCN PAM
caaaaauaaauaaauaaaua

SEQ ID NO: 24052 - RNA, 20 nt, Artificial Sequence
  HTT spacer sequence GTCN PAM
cacucuugucacccaggcug

SEQ ID NO: 24053 - RNA, 20 nt, Artificial Sequence
  HTT spacer sequence GTCN PAM
cccaggcuggagugcaaugg

SEQ ID NO: 24054 - RNA, 20 nt, Artificial Sequence
  HTT spacer sequence GTCN PAM
cagcuauuccggaggcugag

SEQ ID NO: 24055 - RNA, 20 nt, Artificial Sequence
  HTT spacer sequence GTCN PAM
cuacuaaaaauacaaaaauu

SEQ ID NO: 24056 - RNA, 20 nt, Artificial Sequence
  HTT spacer sequence GTCN PAM
cgaacuccugaccucuggug

SEQ ID NO: 24057 - RNA, 20 nt, Artificial Sequence
  HTT spacer sequence GTCN PAM
ggaguucgagaccagccugg

SEQ ID NO: 24058 - RNA, 20 nt, Artificial Sequence
  HTT spacer sequence GTCN PAM
cuaaaaaaauuaaguuccag

SEQ ID NO: 24059 - RNA, 20 nt, Artificial Sequence
  HTT spacer sequence GTCN PAM
cucuaucacccaagcuggag

SEQ ID NO: 24060 - RNA, 20 nt, Artificial Sequence
  HTT spacer sequence GTCN PAM
uucucaagaaaagggaggcu

SEQ ID NO: 24061 - RNA, 20 nt, Artificial Sequence
  HTT spacer sequence GTCN PAM
ccagugggguagcaguagcc

SEQ ID NO: 24062 - RNA, 20 nt, Artificial Sequence
  HTT spacer sequence GTCN PAM
uaaagggaaacccagcauug

SEQ ID NO: 24063 - RNA, 20 nt, Artificial Sequence
  HTT spacer sequence GTCN PAM
cagagccuguccuaaaggga

SEQ ID NO: 24064 - RNA, 20 nt, Artificial Sequence
  HTT spacer sequence GTCN PAM
ccugcucuguggccacaaac

SEQ ID NO: 24065 - RNA, 20 nt, Artificial Sequence
  HTT spacer sequence GTCN PAM
cugaggccaaccuuacuccc

SEQ ID NO: 24066 - RNA, 20 nt, Artificial Sequence
  HTT spacer sequence GTCN PAM
agccugcccagcagggagua

SEQ ID NO: 24067 - RNA, 20 nt, Artificial Sequence
  HTT spacer sequence GTCN PAM
ccagagccuccugccuuuug

SEQ ID NO: 24068 - RNA, 20 nt, Artificial Sequence
  HTT spacer sequence GTCN PAM
uggucuccagagccuccugc

SEQ ID NO: 24069 - RNA, 20 nt, Artificial Sequence
  HTT spacer sequence GTCN PAM
caggcgugagggggugcccc

SEQ ID NO: 24070 - RNA, 20 nt, Artificial Sequence
  HTT spacer sequence GTCN PAM
guggggcacccccucacgcc

SEQ ID NO: 24071 - RNA, 20 nt, Artificial Sequence
  HTT spacer sequence GTCN PAM
uucagcagcagcucagcaga

SEQ ID NO: 24072 - RNA, 20 nt, Artificial Sequence
  HTT spacer sequence GTCN PAM
ugccggaaggucagagcagg

SEQ ID NO: 24073 - RNA, 20 nt, Artificial Sequence
  HTT spacer sequence GTCN PAM
gagcaggggugcacucccau

SEQ ID NO: 24074 - RNA, 20 nt, Artificial Sequence
  HTT spacer sequence GTCN PAM
ggacucauuccugugggcgg

SEQ ID NO: 24075 - RNA, 20 nt, Artificial Sequence
  HTT spacer sequence GTCN PAM
cgaccugggggcguuucuuu

SEQ ID NO: 24076 - RNA, 20 nt, Artificial Sequence
  HTT spacer sequence GTCN PAM
gcgccugcugcccacagagg

SEQ ID NO: 24077 - RNA, 20 nt, Artificial Sequence
  HTT spacer sequence GTCN PAM
ggggcaggccugggugguca

SEQ ID NO: 24078 - RNA, 20 nt, Artificial Sequence
  HTT spacer sequence GTCN PAM
cagcgcagcgccccggaagg

SEQ ID NO: 24079 - RNA, 20 nt, Artificial Sequence
  HTT spacer sequence GTCN PAM
acaggccuggcgccccccau

SEQ ID NO: 24080 - RNA, 20 nt, Artificial Sequence
  HTT spacer sequence GTCN PAM
cacuugggguccucaggucg

SEQ ID NO: 24081 - RNA, 20 nt, Artificial Sequence
  HTT spacer sequence GTCN PAM
ucaggucgugccgaccacgc

SEQ ID NO: 24082 - RNA, 20 nt, Artificial Sequence
  HTT spacer sequence GTCN PAM
ugccgaccacgcgcauucuc

SEQ ID NO: 24083 - RNA, 20 nt, Artificial Sequence
  HTT spacer sequence GTCN PAM
gcacgaccugaggaccccaa

SEQ ID NO: 24084 - RNA, 20 nt, Artificial Sequence
  HTT spacer sequence GTCN PAM
gggugaguauggcucuggcc

SEQ ID NO: 24085 - RNA, 20 nt, Artificial Sequence
  HTT spacer sequence GTCN PAM
acggccggcugucgccccgc

SEQ ID NO: 24086 - RNA, 20 nt, Artificial Sequence
  HTT spacer sequence GTCN PAM
ccccgcuccaggcgucggcg

SEQ ID NO: 24087 - RNA, 20 nt, Artificial Sequence
  HTT spacer sequence GTCN PAM
gcgggggauccuuuccgcau

SEQ ID NO: 24088 - RNA, 20 nt, Artificial Sequence
  HTT spacer sequence GTCN PAM
auggccccguccuucauggg

SEQ ID NO: 24089 - RNA, 20 nt, Artificial Sequence
  HTT spacer sequence GTCN PAM
uucaugggcgagccccucca

SEQ ID NO: 24090 - RNA, 20 nt, Artificial Sequence
  HTT spacer sequence GTCN PAM
ccuccccuaucccgcuccgc

SEQ ID NO: 24091 - RNA, 20 nt, Artificial Sequence
  HTT spacer sequence GTCN PAM
ccguccccagcaucgccccg

SEQ ID NO: 24092 - RNA, 20 nt, Artificial Sequence
  HTT spacer sequence GTCN PAM
ccagcaucgccccgccccgc

SEQ ID NO: 24093 - RNA, 20 nt, Artificial Sequence
  HTT spacer sequence GTCN PAM
cgccccgccccucaggcggc

SEQ ID NO: 24094 - RNA, 20 nt, Artificial Sequence
  HTT spacer sequence GTCN PAM
cgccccgucccuuccucguc

SEQ ID NO: 24095 - RNA, 20 nt, Artificial Sequence
  HTT spacer sequence GTCN PAM
cuuccucgucccgccucgcc

SEQ ID NO: 24096 - RNA, 20 nt, Artificial Sequence
  HTT spacer sequence GTCN PAM
cgccucgccgcgacacuuca

SEQ ID NO: 24097 - RNA, 20 nt, Artificial Sequence
  HTT spacer sequence GTCN PAM
cggcgaggcgggacgaggaa

SEQ ID NO: 24098 - RNA, 20 nt, Artificial Sequence
  HTT spacer sequence GTCN PAM
caccacgccccguccccucu

SEQ ID NO: 24099 - RNA, 20 nt, Artificial Sequence
  HTT spacer sequence GTCN PAM
ccucuccguugagccccgcg

SEQ ID NO: 24100 - RNA, 20 nt, Artificial Sequence
  HTT spacer sequence GTCN PAM
gcggccuugcugugugaggc

SEQ ID NO: 24101 - RNA, 20 nt, Artificial Sequence
  HTT spacer sequence GTCN PAM
gcaggcuagggcugucaauc

SEQ ID NO: 24102 - RNA, 20 nt, Artificial Sequence
  HTT spacer sequence GTCN PAM
aucaugcuggccggcguggc

SEQ ID NO: 24103 - RNA, 20 nt, Artificial Sequence
  HTT spacer sequence GTCN PAM
gggacgcaaggcgccguggg

SEQ ID NO: 24104 - RNA, 20 nt, Artificial Sequence
  HTT spacer sequence GTCN PAM
cagacgcugcgccggcggag

SEQ ID NO: 24105 - RNA, 20 nt, Artificial Sequence
  HTT spacer sequence GTCN PAM
cggcagcccccacggcgccu

SEQ ID NO: 24106 - RNA, 20 nt, Artificial Sequence
  HTT spacer sequence GTCN PAM
aagauggacggccgcucagg

SEQ ID NO: 24107 - RNA, 20 nt, Artificial Sequence
  HTT spacer sequence GTCN PAM
aucuuggacccgucccggca

SEQ ID NO: 24108 - RNA, 20 nt, Artificial Sequence
  HTT spacer sequence GTCN PAM
gcccgaggccuccggggacu

SEQ ID NO: 24109 - RNA, 20 nt, Artificial Sequence
  HTT spacer sequence GTCN PAM
ccggaggccucgggccgacu

SEQ ID NO: 24110 - RNA, 20 nt, Artificial Sequence
  HTT spacer sequence GTCN PAM
cccgcccggcacggcagucc

SEQ ID NO: 24111 - RNA, 20 nt, Artificial Sequence
  HTT spacer sequence GTCN PAM
ccauggcggucucccgcccg

SEQ ID NO: 24112 - RNA, 20 nt, Artificial Sequence
  HTT spacer sequence GTCN PAM
cucaaguccuuccagcagca

SEQ ID NO: 24113 - RNA, 20 nt, Artificial Sequence
  HTT spacer sequence GTCN PAM
uuccagcagcagcagcagca

SEQ ID NO: 24114 - RNA, 20 nt, Artificial Sequence
  HTT spacer sequence GTCN PAM
gugcagcggcuccucagcca

SEQ ID NO: 24115 - RNA, 20 nt, Artificial Sequence
  HTT spacer sequence GTCN PAM
cggcgggucccaggcuacgg

SEQ ID NO: 24116 - RNA, 20 nt, Artificial Sequence
  HTT spacer sequence GTCN PAM
caggcuacggcggggauggc

SEQ ID NO: 24117 - RNA, 20 nt, Artificial Sequence
  HTT spacer sequence GTCN PAM
ccggcccgcaggcugcaggg

SEQ ID NO: 24118 - RNA, 20 nt, Artificial Sequence
  HTT spacer sequence GTCN PAM
cugcggggccggggguucgu

SEQ ID NO: 24119 - RNA, 20 nt, Artificial Sequence
  HTT spacer sequence GTCN PAM
cucugucucugcggggccgg

SEQ ID NO: 24120 - RNA, 20 nt, Artificial Sequence
  HTT spacer sequence GTCN PAM
cucaugggcucuggguugcu

SEQ ID NO: 24121 - RNA, 20 nt, Artificial Sequence
  HTT spacer sequence GTCN PAM
ucccuuguccucucgcgagg

SEQ ID NO: 24122 - RNA, 20 nt, Artificial Sequence
  HTT spacer sequence GTCN PAM
ucucgcgaggggaggcagag

SEQ ID NO: 24123 - RNA, 20 nt, Artificial Sequence
  HTT spacer sequence GTCN PAM
ugaauucaccgaggggaguc

SEQ ID NO: 24124 - RNA, 20 nt, Artificial Sequence
  HTT spacer sequence GTCN PAM
cggccucagcccucucgccc

SEQ ID NO: 24125 - RNA, 20 nt, Artificial Sequence
  HTT spacer sequence GTCN PAM
gagagggaagagggcugggg

SEQ ID NO: 24126 - RNA, 20 nt, Artificial Sequence
  HTT spacer sequence GTCN PAM
cgcgcccccagcccucuucc

SEQ ID NO: 24127 - RNA, 20 nt, Artificial Sequence
  HTT spacer sequence GTCN PAM
uccacugcccccacaucucu

SEQ ID NO: 24128 - RNA, 20 nt, Artificial Sequence
  HTT spacer sequence GTCN PAM
uaaaagcauuaugucaucca

SEQ ID NO: 24129 - RNA, 20 nt, Artificial Sequence
  HTT spacer sequence GTCN PAM
aaugggagauuucuuuuccu

SEQ ID NO: 24130 - RNA, 20 nt, Artificial Sequence
  HTT spacer sequence GTCN PAM
ggacauuucauuuaguucau

SEQ ID NO: 24131 - RNA, 20 nt, Artificial Sequence
  HTT spacer sequence GTCN PAM
ugacaauguaggaagagccu

SEQ ID NO: 24132 - RNA, 20 nt, Artificial Sequence
  HTT spacer sequence GTCN PAM
gcaggcguuugaaugaguug

SEQ ID NO: 24133 - RNA, 20 nt, Artificial Sequence
  HTT spacer sequence GTCN PAM
ggcuugccagaauacggggg

SEQ ID NO: 24134 - RNA, 20 nt, Artificial Sequence
  HTT spacer sequence GTCN PAM
gcagacuccgugggcaucuc

SEQ ID NO: 24135 - RNA, 20 nt, Artificial Sequence
  HTT spacer sequence GTCN PAM
gcggaccccccguauucugg

SEQ ID NO: 24136 - RNA, 20 nt, Artificial Sequence
  HTT spacer sequence GTCN PAM
gcaaugaagcaaacagaaac

SEQ ID NO: 24137 - RNA, 20 nt, Artificial Sequence
  HTT spacer sequence GTCN PAM
cucuuuuccuguuucaaaaa

SEQ ID NO: 24138 - RNA, 20 nt, Artificial Sequence
  HTT spacer sequence GTCN PAM
ugggguuccgcuagauguuu

SEQ ID NO: 24139 - RNA, 20 nt, Artificial Sequence
  HTT spacer sequence GTCN PAM
gugugucgaguguacaguag

SEQ ID NO: 24140 - RNA, 20 nt, Artificial Sequence
  HTT spacer sequence GTCN PAM
aguguacaguaggaguuagg

SEQ ID NO: 24141 - RNA, 20 nt, Artificial Sequence
  HTT spacer sequence GTCN PAM
cagauggcauuugguaagaa

SEQ ID NO: 24142 - RNA, 20 nt, Artificial Sequence
  HTT spacer sequence GTCN PAM
uaacagagauauucuuacca

SEQ ID NO: 24143 - RNA, 20 nt, Artificial Sequence
  HTT spacer sequence GTCN PAM
cgucuucaaaguuuaauuag

SEQ ID NO: 24144 - RNA, 20 nt, Artificial Sequence
  HTT spacer sequence GTCN PAM
ucaaaguuuaauuagaaaau

SEQ ID NO: 24145 - RNA, 20 nt, Artificial Sequence
  HTT spacer sequence GTCN PAM
uaaaaguucacacauugcau

SEQ ID NO: 24146 - RNA, 20 nt, Artificial Sequence
  HTT spacer sequence GTCN PAM
uccuucccaucaggagcccu

SEQ ID NO: 24147 - RNA, 20 nt, Artificial Sequence
  HTT spacer sequence GTCN PAM
gaagcagcccagcagaaagg

SEQ ID NO: 24148 - RNA, 20 nt, Artificial Sequence
  HTT spacer sequence GTCN PAM
aaucagcauaagaaagagaa

SEQ ID NO: 24149 - RNA, 20 nt, Artificial Sequence
  HTT spacer sequence GTCN PAM
aggcagcaaaggaaauuucu

SEQ ID NO: 24150 - RNA, 20 nt, Artificial Sequence
  HTT spacer sequence GTCN PAM
ugauuaaauuuuuuaaauaa

SEQ ID NO: 24151 - RNA, 20 nt, Artificial Sequence
  HTT spacer sequence GTCN PAM
accuaggccucccaaagugc

SEQ ID NO: 24152 - RNA, 20 nt, Artificial Sequence
  HTT spacer sequence GTCN PAM
ggaguuugagaccagccugg

SEQ ID NO: 24153 - RNA, 20 nt, Artificial Sequence
  HTT spacer sequence GTCN PAM
caaacuccugaccucaggug

SEQ ID NO: 24154 - RNA, 20 nt, Artificial Sequence
  HTT spacer sequence GTCN PAM
cuacuaaaaauacaaaaauu

SEQ ID NO: 24155 - RNA, 20 nt, Artificial Sequence
  HTT spacer sequence GTCN PAM
ugguggcacgugccuguaau

SEQ ID NO: 24156 - RNA, 20 nt, Artificial Sequence
  HTT spacer sequence GTCN PAM
gcagugaguugagaucacgc

SEQ ID NO: 24157 - RNA, 20 nt, Artificial Sequence
  HTT spacer sequence GTCN PAM
cccaggcuggagugcagugg

SEQ ID NO: 24158 - RNA, 20 nt, Artificial Sequence
  HTT spacer sequence GTCN PAM
cgcucugucacccaggcugg

SEQ ID NO: 24159 - RNA, 20 nt, Artificial Sequence
  HTT spacer sequence GTCN PAM
auguauuacuuaugcaaaaa

SEQ ID NO: 24160 - RNA, 20 nt, Artificial Sequence
  HTT spacer sequence GTCN PAM
ccaagaacaagcacuauuuc

SEQ ID NO: 24161 - RNA, 20 nt, Artificial Sequence
  HTT spacer sequence GTCN PAM
cacauugucacccaggcugg

SEQ ID NO: 24162 - RNA, 20 nt, Artificial Sequence
  HTT spacer sequence GTCN PAM
cccaggcuggagugcaguga

SEQ ID NO: 24163 - RNA, 20 nt, Artificial Sequence
  HTT spacer sequence GTCN PAM
cugccucccagguucaaaug

SEQ ID NO: 24164 - RNA, 20 nt, Artificial Sequence
  HTT spacer sequence GTCN PAM
agcuaauuuuuguauuuuua

SEQ ID NO: 24165 - RNA, 20 nt, Artificial Sequence
  HTT spacer sequence GTCN PAM
ugaacuccugaccuugugau

SEQ ID NO: 24166 - RNA, 20 nt, Artificial Sequence
  HTT spacer sequence GTCN PAM
ggaguucaagaccagccugg

SEQ ID NO: 24167 - RNA, 20 nt, Artificial Sequence
  HTT spacer sequence GTCN PAM
accucggccucccaaagugc

SEQ ID NO: 24168 - RNA, 20 nt, Artificial Sequence
  HTT spacer sequence GTCN PAM
uauuucucuguauuuugcug

SEQ ID NO: 24169 - RNA, 20 nt, Artificial Sequence
  HTT spacer sequence GTCN PAM
cgccaugcaugggccucagu

SEQ ID NO: 24170 - RNA, 20 nt, Artificial Sequence
  HTT spacer sequence GTCN PAM
ucacaguaauuaggaggcaa

SEQ ID NO: 24171 - RNA, 20 nt, Artificial Sequence
  HTT spacer sequence GTCN PAM
gggaaacaccagauaggaau

SEQ ID NO: 24172 - RNA, 20 nt, Artificial Sequence
  HTT spacer sequence GTCN PAM
gcucacugcugagcccugca

SEQ ID NO: 24173 - RNA, 20 nt, Artificial Sequence
  HTT spacer sequence GTCN PAM
uucauuagaaugaaagcuuc

SEQ ID NO: 24174 - RNA, 20 nt, Artificial Sequence
  HTT spacer sequence GTCN PAM
auguccuucauuagaaugaa

SEQ ID NO: 24175 - RNA, 20 nt, Artificial Sequence
  HTT spacer sequence GTCN PAM
ggguuaaucgaguguuaacu

SEQ ID NO: 24176 - RNA, 20 nt, Artificial Sequence
  HTT spacer sequence GTCN PAM
agcaggcuuucuggguuuug

SEQ ID NO: 24177 - RNA, 20 nt, Artificial Sequence
  HTT spacer sequence GTCN PAM
acacuuagugcuacagcucu

SEQ ID NO: 24178 - RNA, 20 nt, Artificial Sequence
  HTT spacer sequence GTCN PAM
caaaaaaaacaaaacaaaac

SEQ ID NO: 24179 - RNA, 20 nt, Artificial Sequence
  HTT spacer sequence GTCN PAM
auaaucccagcuaaacagga

SEQ ID NO: 24180 - RNA, 20 nt, Artificial Sequence
  HTT spacer sequence GTCN PAM
cgggggaaaaaaaaaaaauu

SEQ ID NO: 24181 - RNA, 20 nt, Artificial Sequence
  HTT spacer sequence GTCN PAM
ugcucugucgcccaggcugg

SEQ ID NO: 24182 - RNA, 20 nt, Artificial Sequence
  HTT spacer sequence GTCN PAM
cccaggcuggagugcagugg

SEQ ID NO: 24183 - RNA, 20 nt, Artificial Sequence
  HTT spacer sequence GTCN PAM
cccaaguagcugggacuaca

SEQ ID NO: 24184 - RNA, 20 nt, Artificial Sequence
  HTT spacer sequence GTCN PAM
cagcuacuugggagacugag

SEQ ID NO: 24185 - RNA, 20 nt, Artificial Sequence
  HTT spacer sequence GTCN PAM
agcuaauuuuuuuguauuuu

SEQ ID NO: 24186 - RNA, 20 nt, Artificial Sequence
  HTT spacer sequence GTCN PAM
cuauuaaaaauacaaaaaaa

SEQ ID NO: 24187 - RNA, 20 nt, Artificial Sequence
  HTT spacer sequence GTCN PAM
ggagaucaagaucauccugg

SEQ ID NO: 24188 - RNA, 20 nt, Artificial Sequence
  HTT spacer sequence GTCN PAM
uccgccgaccuugugauccg

SEQ ID NO: 24189 - RNA, 20 nt, Artificial Sequence
  HTT spacer sequence GTCN PAM
gcggaugacgaggucaggag

SEQ ID NO: 24190 - RNA, 20 nt, Artificial Sequence
  HTT spacer sequence GTCN PAM
cgaacucccggccucaugug

SEQ ID NO: 24191 - RNA, 20 nt, Artificial Sequence
  HTT spacer sequence GTCN PAM
acugagaagacagcuuuuuu

SEQ ID NO: 24192 - RNA, 20 nt, Artificial Sequence
  HTT spacer sequence GTCN PAM
ucucaguggaccuucccuga

SEQ ID NO: 24193 - RNA, 20 nt, Artificial Sequence
  HTT spacer sequence GTCN PAM
ugcucuuuaacccaggcugg

SEQ ID NO: 24194 - RNA, 20 nt, Artificial Sequence
  HTT spacer sequence GTCN PAM
caacacauugugagguugag

SEQ ID NO: 24195 - RNA, 20 nt, Artificial Sequence
  HTT spacer sequence GTCN PAM
uuacucaaaagccaucaucu

SEQ ID NO: 24196 - RNA, 20 nt, Artificial Sequence
  HTT spacer sequence GTCN PAM
aguguaaggguguaugaagu

SEQ ID NO: 24197 - RNA, 20 nt, Artificial Sequence
  HTT spacer sequence GTCN PAM
aaaaucuuccuguuucagga

SEQ ID NO: 24198 - RNA, 20 nt, Artificial Sequence
  HTT spacer sequence GTCN PAM
uuuuaguugggugaauugag

SEQ ID NO: 24199 - RNA, 20 nt, Artificial Sequence
  HTT spacer sequence GTCN PAM
cccucacucaauucacccaa

SEQ ID NO: 24200 - RNA, 20 nt, Artificial Sequence
  HTT spacer sequence GTCN PAM
aagaggucaagggagugcca

SEQ ID NO: 24201 - RNA, 20 nt, Artificial Sequence
  HTT spacer sequence GTCN PAM
agggagugccauaucagacc

SEQ ID NO: 24202 - RNA, 20 nt, Artificial Sequence
  HTT spacer sequence GTCN PAM
gauauggcacucccuugacc

SEQ ID NO: 24203 - RNA, 20 nt, Artificial Sequence
  HTT spacer sequence GTCN PAM
cuggaggauuagagcagagg

SEQ ID NO: 24204 - RNA, 20 nt, Artificial Sequence
  HTT spacer sequence GTCN PAM
gccagaguucacuuaagauu

SEQ ID NO: 24205 - RNA, 20 nt, Artificial Sequence
  HTT spacer sequence GTCN PAM
ggguaccggcugucggcugu

SEQ ID NO: 24206 - RNA, 20 nt, Artificial Sequence
  HTT spacer sequence GTCN PAM
gcugugggcagugugaggaa

SEQ ID NO: 24207 - RNA, 20 nt, Artificial Sequence
  HTT spacer sequence GTCN PAM
uuccucacacugcccacagc

SEQ ID NO: 24208 - RNA, 20 nt, Artificial Sequence
  HTT spacer sequence GTCN PAM
gucauuccucacacugccca

SEQ ID NO: 24209 - RNA, 20 nt, Artificial Sequence
  HTT spacer sequence GTCN PAM
ucugauaagcucuugcuugu

SEQ ID NO: 24210 - RNA, 20 nt, Artificial Sequence
  HTT spacer sequence GTCN PAM
ggggaaauucaacaauaagu

SEQ ID NO: 24211 - RNA, 20 nt, Artificial Sequence
  HTT spacer sequence GTCN PAM
cccgggcuggagugcaauga

SEQ ID NO: 24212 - RNA, 20 nt, Artificial Sequence
  HTT spacer sequence GTCN PAM
cgaacuucugaccucaggug

SEQ ID NO: 24213 - RNA, 20 nt, Artificial Sequence
  HTT spacer sequence GTCN PAM
gaaguucgagaccagccugg

SEQ ID NO: 24214 - RNA, 20 nt, Artificial Sequence
  HTT spacer sequence GTCN PAM
gaacccaggcucuuucuuau

SEQ ID NO: 24215 - RNA, 20 nt, Artificial Sequence
  HTT spacer sequence GTCN PAM
uuuuacuuucuugauagugu

SEQ ID NO: 24216 - RNA, 20 nt, Artificial Sequence
  HTT spacer sequence GTCN PAM
uuugaaguguaaaaguuuuu

SEQ ID NO: 24217 - RNA, 20 nt, Artificial Sequence
  HTT spacer sequence GTCN PAM
aguuuaucuauuuugucuuu

SEQ ID NO: 24218 - RNA, 20 nt, Artificial Sequence
  HTT spacer sequence GTCN PAM
uugguugcugugcuucaagu

SEQ ID NO: 24219 - RNA, 20 nt, Artificial Sequence
  HTT spacer sequence GTCN PAM
uaucuaagaaaucauugucu

SEQ ID NO: 24220 - RNA, 20 nt, Artificial Sequence
  HTT spacer sequence GTCN PAM
aauccaaagucaaaaagguu

SEQ ID NO: 24221 - RNA, 20 nt, Artificial Sequence
  HTT spacer sequence GTCN PAM
aaaagguuuacuccuauguu

SEQ ID NO: 24222 - RNA, 20 nt, Artificial Sequence
  HTT spacer sequence GTCN PAM
gauccauuuugaguuaauuu

SEQ ID NO: 24223 - RNA, 20 nt, Artificial Sequence
  HTT spacer sequence GTCN PAM
aacuuuauucuuuuccaugu

SEQ ID NO: 24224 - RNA, 20 nt, Artificial Sequence
  HTT spacer sequence GTCN PAM
cagcacuguuuguugaagag

SEQ ID NO: 24225 - RNA, 20 nt, Artificial Sequence
  HTT spacer sequence GTCN PAM
cuucaacaaacagugcuggg

SEQ ID NO: 24226 - RNA, 20 nt, Artificial Sequence
  HTT spacer sequence GTCN PAM
uuaauuguauaaauuuauuu

SEQ ID NO: 24227 - RNA, 20 nt, Artificial Sequence
  HTT spacer sequence GTCN PAM
agaaauaaauuuauacaauu

SEQ ID NO: 24228 - RNA, 20 nt, Artificial Sequence
  HTT spacer sequence GTCN PAM
guucuaccuguuggucuuua

SEQ ID NO: 24229 - RNA, 20 nt, Artificial Sequence
  HTT spacer sequence GTCN PAM
uuaugucgauccugugccag

SEQ ID NO: 24230 - RNA, 20 nt, Artificial Sequence
  HTT spacer sequence GTCN PAM
auccugugccaguaccauac

SEQ ID NO: 24231 - RNA, 20 nt, Artificial Sequence
  HTT spacer sequence GTCN PAM
ugauuacugaaguuuguguc

SEQ ID NO: 24232 - RNA, 20 nt, Artificial Sequence
  HTT spacer sequence GTCN PAM
caguuuaaauucaugaaaug

SEQ ID NO: 24233 - RNA, 20 nt, Artificial Sequence
  HTT spacer sequence GTCN PAM
cuugcauuuccguacgaauu

SEQ ID NO: 24234 - RNA, 20 nt, Artificial Sequence
  HTT spacer sequence GTCN PAM
guuucaacaaagaagccaag

SEQ ID NO: 24235 - RNA, 20 nt, Artificial Sequence
  HTT spacer sequence GTCN PAM
uccaccuaugaacaugggca

SEQ ID NO: 24236 - RNA, 20 nt, Artificial Sequence
  HTT spacer sequence GTCN PAM
gauuguaaguauuucgggcu

SEQ ID NO: 24237 - RNA, 20 nt, Artificial Sequence
  HTT spacer sequence GTCN PAM
cugucacagcuacgcggcuc

SEQ ID NO: 24238 - RNA, 20 nt, Artificial Sequence
  HTT spacer sequence GTCN PAM
cagcuacgcggcucugccau

SEQ ID NO: 24239 - RNA, 20 nt, Artificial Sequence
  HTT spacer sequence GTCN PAM
guguuccaauagaauuuuau

SEQ ID NO: 24240 - RNA, 20 nt, Artificial Sequence
  HTT spacer sequence GTCN PAM
uuaauaaaauucuauuggaa

SEQ ID NO: 24241 - RNA, 20 nt, Artificial Sequence
  HTT spacer sequence GTCN PAM
ugagauaguauuugauuauu

SEQ ID NO: 24242 - RNA, 20 nt, Artificial Sequence
  HTT spacer sequence GTCN PAM
accauuuaaaaauguaaaaa

SEQ ID NO: 24243 - RNA, 20 nt, Artificial Sequence
  HTT spacer sequence GTCN PAM
uaucauauuuuaaccuagga

SEQ ID NO: 24244 - RNA, 20 nt, Artificial Sequence
  HTT spacer sequence GTCN PAM
caaaaaaaaaaaaaaaaaaa

SEQ ID NO: 24245 - RNA, 20 nt, Artificial Sequence
  HTT spacer sequence GTCN PAM
ugaaccugggaggcagaggu

SEQ ID NO: 24246 - RNA, 20 nt, Artificial Sequence
  HTT spacer sequence GTCN PAM
cuacuaaaaauacaaaauua

SEQ ID NO: 24247 - RNA, 20 nt, Artificial Sequence
  HTT spacer sequence GTCN PAM
ggcuggucuugaacuccuga

SEQ ID NO: 24248 - RNA, 20 nt, Artificial Sequence
  HTT spacer sequence GTCN PAM
ugaacuccugaccucaggug

SEQ ID NO: 24249 - RNA, 20 nt, Artificial Sequence
  HTT spacer sequence GTCN PAM
ggaguucaagaccagccuga

SEQ ID NO: 24250 - RNA, 20 nt, Artificial Sequence
  HTT spacer sequence GTCN PAM
gucaucuuugucuaacuucc

SEQ ID NO: 24251 - RNA, 20 nt, Artificial Sequence
  HTT spacer sequence GTCN PAM
ucuuugucuaacuuccuaag

SEQ ID NO: 24252 - RNA, 20 nt, Artificial Sequence
  HTT spacer sequence GTCN PAM
aacuuccuaagaacaaaagu

SEQ ID NO: 24253 - RNA, 20 nt, Artificial Sequence
  HTT spacer sequence GTCN PAM
ucuucccagauuuuaauaug

SEQ ID NO: 24254 - RNA, 20 nt, Artificial Sequence
  HTT spacer sequence GTCN PAM
uuuuuuguuugcuugacuga

SEQ ID NO: 24255 - RNA, 20 nt, Artificial Sequence
  HTT spacer sequence GTCN PAM
agcaaacaaaaaaugacaca

SEQ ID NO: 24256 - RNA, 20 nt, Artificial Sequence
  HTT spacer sequence GTCN PAM
uagauauuguuccauagcag

SEQ ID NO: 24257 - RNA, 20 nt, Artificial Sequence
  HTT spacer sequence GTCN PAM
ucuuuuaaaaagaaauucua

SEQ ID NO: 24258 - RNA, 20 nt, Artificial Sequence
  HTT spacer sequence GTCN PAM
cacauuuuuguggcuguaga

SEQ ID NO: 24259 - RNA, 20 nt, Artificial Sequence
  HTT spacer sequence GTCN PAM
ccagcacauucuacagccac

SEQ ID NO: 24260 - RNA, 20 nt, Artificial Sequence
  HTT spacer sequence GTCN PAM
ccauccccaucaccuccauu

SEQ ID NO: 24261 - RNA, 20 nt, Artificial Sequence
  HTT spacer sequence GTCN PAM
accacuugauaaacuaccuu

SEQ ID NO: 24262 - RNA, 20 nt, Artificial Sequence
  HTT spacer sequence GTCN PAM
uauucagacaacaaggagga

SEQ ID NO: 24263 - RNA, 20 nt, Artificial Sequence
  HTT spacer sequence GTCN PAM
gaauaagacuaaauguuuug

SEQ ID NO: 24264 - RNA, 20 nt, Artificial Sequence
  HTT spacer sequence GTCN PAM
cuaacauacauucuagcccc

SEQ ID NO: 24265 - RNA, 20 nt, Artificial Sequence
  HTT spacer sequence GTCN PAM
auagguccuugcuaucacag

SEQ ID NO: 24266 - RNA, 20 nt, Artificial Sequence
  HTT spacer sequence GTCN PAM
uugcuaucacagugaggucu

SEQ ID NO: 24267 - RNA, 20 nt, Artificial Sequence
  HTT spacer sequence GTCN PAM
cagggacagucguuugguau

SEQ ID NO: 24268 - RNA, 20 nt, Artificial Sequence
  HTT spacer sequence GTCN PAM
cugagaccucacugugauag

SEQ ID NO: 24269 - RNA, 20 nt, Artificial Sequence
  HTT spacer sequence GTCN PAM
uuugguaucauuugggaucu

SEQ ID NO: 24270 - RNA, 20 nt, Artificial Sequence
  HTT spacer sequence GTCN PAM
gcuuaugagaucccaaauga

SEQ ID NO: 24271 - RNA, 20 nt, Artificial Sequence
  HTT spacer sequence GTCN PAM
agcagagagagucugcuuau

SEQ ID NO: 24272 - RNA, 20 nt, Artificial Sequence
  HTT spacer sequence GTCN PAM
ggucaagcagagagagucug

SEQ ID NO: 24273 - RNA, 20 nt, Artificial Sequence
  HTT spacer sequence GTCN PAM
guguuuuaacagguucagug

SEQ ID NO: 24274 - RNA, 20 nt, Artificial Sequence
  HTT spacer sequence GTCN PAM
cucacugaaccuguuaaaac

SEQ ID NO: 24275 - RNA, 20 nt, Artificial Sequence
  HTT spacer sequence GTCN PAM
aagcaccuacaguggagcuu

SEQ ID NO: 24276 - RNA, 20 nt, Artificial Sequence
  HTT spacer sequence GTCN PAM
uccucccaaaugcuugcauu

SEQ ID NO: 24277 - RNA, 20 nt, Artificial Sequence
  HTT spacer sequence GTCN PAM
agguguagcugagguggccu

SEQ ID NO: 24278 - RNA, 20 nt, Artificial Sequence
  HTT spacer sequence GTCN PAM
cacuaccaauggcugggagc

SEQ ID NO: 24279 - RNA, 20 nt, Artificial Sequence
  HTT spacer sequence GTCN PAM
uuccaguucaucuaagcgag

SEQ ID NO: 24280 - RNA, 20 nt, Artificial Sequence
  HTT spacer sequence GTCN PAM
cuccccucauucgguuguuu

SEQ ID NO: 24281 - RNA, 20 nt, Artificial Sequence
  HTT spacer sequence GTCN PAM
ccuucuaaccacagcucucc

SEQ ID NO: 24282 - RNA, 20 nt, Artificial Sequence
  HTT spacer sequence GTCN PAM
aggcagaguuaacagaaggc

SEQ ID NO: 24283 - RNA, 20 nt, Artificial Sequence
  HTT spacer sequence GTCN PAM
cuaaccucucaucucucgca

SEQ ID NO: 24284 - RNA, 20 nt, Artificial Sequence
  HTT spacer sequence GTCN PAM
ugugcaccaagauaagcuug

SEQ ID NO: 24285 - RNA, 20 nt, Artificial Sequence
  HTT spacer sequence GTCN PAM
aaacaaguaguuuaauuuau

SEQ ID NO: 24286 - RNA, 20 nt, Artificial Sequence
  HTT spacer sequence GTCN PAM
caaacuacugguauuacagg

SEQ ID NO: 24287 - RNA, 20 nt, Artificial Sequence
  HTT spacer sequence GTCN PAM
ggccucaggcaauccuccca

SEQ ID NO: 24288 - RNA, 20 nt, Artificial Sequence
  HTT spacer sequence GTCN PAM
ucuggccucaggcaauccuc

SEQ ID NO: 24289 - RNA, 20 nt, Artificial Sequence
  HTT spacer sequence GTCN PAM
cuacaaaaaacuuuaaaaaa

SEQ ID NO: 24290 - RNA, 20 nt, Artificial Sequence
  HTT spacer sequence GTCN PAM
cagcuacucaggaggcugag

SEQ ID NO: 24291 - RNA, 20 nt, Artificial Sequence
  HTT spacer sequence GTCN PAM
aggaguuugaggcugcagug

SEQ ID NO: 24292 - RNA, 20 nt, Artificial Sequence
  HTT spacer sequence GTCN PAM
cacucucuugcccagguugu

SEQ ID NO: 24293 - RNA, 20 nt, Artificial Sequence
  HTT spacer sequence GTCN PAM
cuaaauauacacacacacac

SEQ ID NO: 24294 - RNA, 20 nt, Artificial Sequence
  HTT spacer sequence GTCN PAM
aagugaucuuuucaucuaaa

SEQ ID NO: 24295 - RNA, 20 nt, Artificial Sequence
  HTT spacer sequence GTCN PAM
cuuauugcuggugggaauau

SEQ ID NO: 24296 - RNA, 20 nt, Artificial Sequence
  HTT spacer sequence GTCN PAM
uaaaacugaacauaccguua

SEQ ID NO: 24297 - RNA, 20 nt, Artificial Sequence
  HTT spacer sequence GTCN PAM
uucaacaggugaaugguuaa

SEQ ID NO: 24298 - RNA, 20 nt, Artificial Sequence
  HTT spacer sequence GTCN PAM
uuuuauaaccacauucaccu

SEQ ID NO: 24299 - RNA, 20 nt, Artificial Sequence
  HTT spacer sequence GTCN PAM
uuuuuuuuuuuuuuuuuuuu

SEQ ID NO: 24300 - RNA, 20 nt, Artificial Sequence
  HTT spacer sequence GTCN PAM
ccaaaaaaaaaaaaaaaaaa

SEQ ID NO: 24301 - RNA, 20 nt, Artificial Sequence
  HTT spacer sequence GTCN PAM
ugcucuguugcccaggcugg

SEQ ID NO: 24302 - RNA, 20 nt, Artificial Sequence
  HTT spacer sequence GTCN PAM
cagucucccauguucagagu

SEQ ID NO: 24303 - RNA, 20 nt, Artificial Sequence
  HTT spacer sequence GTCN PAM
cccauguucagagugaaaca

SEQ ID NO: 24304 - RNA, 20 nt, Artificial Sequence
  HTT spacer sequence GTCN PAM
uguguguuggauuauuugga

SEQ ID NO: 24305 - RNA, 20 nt, Artificial Sequence
  HTT spacer sequence GTCN PAM
gacgugguggcucaugccug

SEQ ID NO: 24306 - RNA, 20 nt, Artificial Sequence
  HTT spacer sequence GTCN PAM
gaccugaucuugauguuuua

SEQ ID NO: 24307 - RNA, 20 nt, Artificial Sequence
  HTT spacer sequence GTCN PAM
ggaguucgagaccagccggg

SEQ ID NO: 24308 - RNA, 20 nt, Artificial Sequence
  HTT spacer sequence GTCN PAM
cgaacuccugaccucaagug

SEQ ID NO: 24309 - RNA, 20 nt, Artificial Sequence
  HTT spacer sequence GTCN PAM
agaugggguuucaucauguu

SEQ ID NO: 24310 - RNA, 20 nt, Artificial Sequence
  HTT spacer sequence GTCN PAM
cagcuacuugggaggcugag

SEQ ID NO: 24311 - RNA, 20 nt, Artificial Sequence
  HTT spacer sequence GTCN PAM
cacaggcugaagugcaaugg

SEQ ID NO: 24312 - RNA, 20 nt, Artificial Sequence
  HTT spacer sequence GTCN PAM
uacucugucacacaggcuga

SEQ ID NO: 24313 - RNA, 20 nt, Artificial Sequence
  HTT spacer sequence GTCN PAM
ggagauccagaccaucccgg

SEQ ID NO: 24314 - RNA, 20 nt, Artificial Sequence
  HTT spacer sequence GTCN PAM
ggaucuccugaccucgugau

SEQ ID NO: 24315 - RNA, 20 nt, Artificial Sequence
  HTT spacer sequence GTCN PAM
cuacuaaaaaauacaaaaaa

SEQ ID NO: 24316 - RNA, 20 nt, Artificial Sequence
  HTT spacer sequence GTCN PAM
cagcuacuugggaggcugaa

SEQ ID NO: 24317 - RNA, 20 nt, Artificial Sequence
  HTT spacer sequence GTCN PAM
cccaggcuggagugcagugg

SEQ ID NO: 24318 - RNA, 20 nt, Artificial Sequence
  HTT spacer sequence GTCN PAM
ugcucugucgcccaggcugg

SEQ ID NO: 24319 - RNA, 20 nt, Artificial Sequence
  HTT spacer sequence GTCN PAM
cgggggaaaaaaaaaaauaa

SEQ ID NO: 24320 - RNA, 20 nt, Artificial Sequence
  HTT spacer sequence GTCN PAM
uugaguuuacaugccccucc

SEQ ID NO: 24321 - RNA, 20 nt, Artificial Sequence
  HTT spacer sequence GTCN PAM
caaaaaaaaaaaaauuaaaa

SEQ ID NO: 24322 - RNA, 20 nt, Artificial Sequence
  HTT spacer sequence GTCN PAM
ggcucuguuccccaggcuag

SEQ ID NO: 24323 - RNA, 20 nt, Artificial Sequence
  HTT spacer sequence GTCN PAM
cgaacuccugaccucagaug

SEQ ID NO: 24324 - RNA, 20 nt, Artificial Sequence
  HTT spacer sequence GTCN PAM
ggaguucgagaccagccugg

SEQ ID NO: 24325 - RNA, 20 nt, Artificial Sequence
  HTT spacer sequence GTCN PAM
cuuucacuucaccuucaaaa

SEQ ID NO: 24326 - RNA, 20 nt, Artificial Sequence
  HTT spacer sequence GTCN PAM
uggcuuuucaaucacuuuug

SEQ ID NO: 24327 - RNA, 20 nt, Artificial Sequence
  HTT spacer sequence GTCN PAM
guuugaguuaucaguucauc

SEQ ID NO: 24328 - RNA, 20 nt, Artificial Sequence
  HTT spacer sequence GTCN PAM
aauaagcaaaccuggaaguu

SEQ ID NO: 24329 - RNA, 20 nt, Artificial Sequence
  HTT spacer sequence GTCN PAM
uuuaguuuaguuguuuuuag

SEQ ID NO: 24330 - RNA, 20 nt, Artificial Sequence
  HTT spacer sequence GTCN PAM
uauguuuuggaucaccccuc

SEQ ID NO: 24331 - RNA, 20 nt, Artificial Sequence
  HTT spacer sequence GTCN PAM
ucacaguuggcacuaucaaa

SEQ ID NO: 24332 - RNA, 20 nt, Artificial Sequence
  HTT spacer sequence GTCN PAM
uaauaggaggcuuauuccca

SEQ ID NO: 24333 - RNA, 20 nt, Artificial Sequence
  HTT spacer sequence GTCN PAM
ccaaauagcugggaauaagc

SEQ ID NO: 24334 - RNA, 20 nt, Artificial Sequence
  HTT spacer sequence GTCN PAM
gugugguauguugauuguag

SEQ ID NO: 24335 - RNA, 20 nt, Artificial Sequence
  HTT spacer sequence GTCN PAM
guuaacgauuuugagaacug

SEQ ID NO: 24336 - RNA, 20 nt, Artificial Sequence
  HTT spacer sequence GTCN PAM
aauaccuacucuauauauac

SEQ ID NO: 24337 - RNA, 20 nt, Artificial Sequence
  HTT spacer sequence GTCN PAM
ucuggcuuuaaaucuccucu

SEQ ID NO: 24338 - RNA, 20 nt, Artificial Sequence
  HTT spacer sequence GTCN PAM
uacagccagcauuuaaaccc

SEQ ID NO: 24339 - RNA, 20 nt, Artificial Sequence
  HTT spacer sequence GTCN PAM
ugguuggcacuucaauuucu

SEQ ID NO: 24340 - RNA, 20 nt, Artificial Sequence
  HTT spacer sequence GTCN PAM
ugguggcucauaccuauaau

SEQ ID NO: 24341 - RNA, 20 nt, Artificial Sequence
  HTT spacer sequence GTCN PAM
cuacaaaauauuuugaaaaa

SEQ ID NO: 24342 - RNA, 20 nt, Artificial Sequence
  HTT spacer sequence GTCN PAM
gcgccacucaggaggcugag

SEQ ID NO: 24343 - RNA, 20 nt, Artificial Sequence
  HTT spacer sequence GTCN PAM
cagccuccugaguggcgcgg

SEQ ID NO: 24344 - RNA, 20 nt, Artificial Sequence
  HTT spacer sequence GTCN PAM
ggaucuugcucugcugccca

SEQ ID NO: 24345 - RNA, 20 nt, Artificial Sequence
  HTT spacer sequence GTCN PAM
agcuacgcugcucacagaaa

SEQ ID NO: 24346 - RNA, 20 nt, Artificial Sequence
  HTT spacer sequence GTCN PAM
agauccccauucugcccgca

SEQ ID NO: 24347 - RNA, 20 nt, Artificial Sequence
  HTT spacer sequence GTCN PAM
agaaacacucacugaaugaa

SEQ ID NO: 24348 - RNA, 20 nt, Artificial Sequence
  HTT spacer sequence GTCN PAM
uucuugguagcugaaaguuc

SEQ ID NO: 24349 - RNA, 20 nt, Artificial Sequence
  HTT spacer sequence GTCN PAM
gacaauaugugaaaacauag

SEQ ID NO: 24350 - RNA, 20 nt, Artificial Sequence
  HTT spacer sequence GTCN PAM
gacaaugauucacacggucu

SEQ ID NO: 24351 - RNA, 20 nt, Artificial Sequence
  HTT spacer sequence GTCN PAM
gucagguaauugcacuuuga

SEQ ID NO: 24352 - RNA, 20 nt, Artificial Sequence
  HTT spacer sequence GTCN PAM
gguaauugcacuuugaacug

SEQ ID NO: 24353 - RNA, 20 nt, Artificial Sequence
  HTT spacer sequence GTCN PAM
agagaaaauaagaacuuugu

SEQ ID NO: 24354 - RNA, 20 nt, Artificial Sequence
  HTT spacer sequence GTCN PAM
uaaugggcuagaauauucuu

SEQ ID NO: 24355 - RNA, 20 nt, Artificial Sequence
  HTT spacer sequence GTCN PAM
cagcuauuuuaaauggauuc

SEQ ID NO: 24356 - RNA, 20 nt, Artificial Sequence
  HTT spacer sequence GTCN PAM
uucuucaucuuaaauggauu

SEQ ID NO: 24357 - RNA, 20 nt, Artificial Sequence
  HTT spacer sequence GTCN PAM
ggauauccuuguauauagcc

SEQ ID NO: 24358 - RNA, 20 nt, Artificial Sequence
  HTT spacer sequence GTCN PAM
ugugcuguuccuacuauugc

SEQ ID NO: 24359 - RNA, 20 nt, Artificial Sequence
  HTT spacer sequence GTCN PAM
cucuuauuugcuuuuucuug

SEQ ID NO: 24360 - RNA, 20 nt, Artificial Sequence
  HTT spacer sequence GTCN PAM
uauuguaccucugcuccuag

SEQ ID NO: 24361 - RNA, 20 nt, Artificial Sequence
  HTT spacer sequence GTCN PAM
augccccacgauccccacua

SEQ ID NO: 24362 - RNA, 20 nt, Artificial Sequence
  HTT spacer sequence GTCN PAM
gcuuuccuugcuugaucuuu

SEQ ID NO: 24363 - RNA, 20 nt, Artificial Sequence
  HTT spacer sequence GTCN PAM
aaagcaaagcagcuacaaaa

SEQ ID NO: 24364 - RNA, 20 nt, Artificial Sequence
  HTT spacer sequence GTCN PAM
gaaagauagucaaaagcaaa

SEQ ID NO: 24365 - RNA, 20 nt, Artificial Sequence
  HTT spacer sequence GTCN PAM
ccuacugagccauuggaaac

SEQ ID NO: 24366 - RNA, 20 nt, Artificial Sequence
  HTT spacer sequence GTCN PAM
gucagaaaaaaauuuuuaga

SEQ ID NO: 24367 - RNA, 20 nt, Artificial Sequence
  HTT spacer sequence GTCN PAM
gaaaaaaauuuuuagacaaa

SEQ ID NO: 24368 - RNA, 20 nt, Artificial Sequence
  HTT spacer sequence GTCN PAM
aaaaauuuuuuucugacuga

SEQ ID NO: 24369 - RNA, 20 nt, Artificial Sequence
  HTT spacer sequence GTCN PAM
guacuaaaaucaagauuauu

SEQ ID NO: 24370 - RNA, 20 nt, Artificial Sequence
  HTT spacer sequence GTCN PAM
caaaaaaaaauuaaaaaaag

SEQ ID NO: 24371 - RNA, 20 nt, Artificial Sequence
  HTT spacer sequence GTCN PAM
ggcugaucucgaacucccaa

SEQ ID NO: 24372 - RNA, 20 nt, Artificial Sequence
  HTT spacer sequence GTCN PAM
caaaaaaaaaaaaaaaacaa

SEQ ID NO: 24373 - RNA, 20 nt, Artificial Sequence
  HTT spacer sequence GTCN PAM
cgaucugucacccaggcugg

SEQ ID NO: 24374 - RNA, 20 nt, Artificial Sequence
  HTT spacer sequence GTCN PAM
cccaggcuggagugcagugg

SEQ ID NO: 24375 - RNA, 20 nt, Artificial Sequence
  HTT spacer sequence GTCN PAM
cagcuacucgccaggcugaa

SEQ ID NO: 24376 - RNA, 20 nt, Artificial Sequence
  HTT spacer sequence GTCN PAM
ugaucuccugaccucaugac

SEQ ID NO: 24377 - RNA, 20 nt, Artificial Sequence
  HTT spacer sequence GTCN PAM
ggagaucaagaccacgguga

SEQ ID NO: 24378 - RNA, 20 nt, Artificial Sequence
  HTT spacer sequence GTCN PAM
ugaggucaggagaucaagac

SEQ ID NO: 24379 - RNA, 20 nt, Artificial Sequence
  HTT spacer sequence GTCN PAM
uuuuauugugguaaaaugca

SEQ ID NO: 24380 - RNA, 20 nt, Artificial Sequence
  HTT spacer sequence GTCN PAM
auuuuaugugcauuuuacca

SEQ ID NO: 24381 - RNA, 20 nt, Artificial Sequence
  HTT spacer sequence GTCN PAM
uaaccauuuuuagggguaca

SEQ ID NO: 24382 - RNA, 20 nt, Artificial Sequence
  HTT spacer sequence GTCN PAM
aaacugaacaucugucuuca

SEQ ID NO: 24383 - RNA, 20 nt, Artificial Sequence
  HTT spacer sequence GTCN PAM
ucauuaaacucccuaucauc

SEQ ID NO: 24384 - RNA, 20 nt, Artificial Sequence
  HTT spacer sequence GTCN PAM
cuuucuacuuucugucugua

SEQ ID NO: 24385 - RNA, 20 nt, Artificial Sequence
  HTT spacer sequence GTCN PAM
guaugaguguaacugcucug

SEQ ID NO: 24386 - RNA, 20 nt, Artificial Sequence
  HTT spacer sequence GTCN PAM
ccagagcaguuacacucaua

SEQ ID NO: 24387 - RNA, 20 nt, Artificial Sequence
  HTT spacer sequence GTCN PAM
aauuuguggaaauguugugg

SEQ ID NO: 24388 - RNA, 20 nt, Artificial Sequence
  HTT spacer sequence GTCN PAM
ugaaaauaaaaauauaaaaa

SEQ ID NO: 24389 - RNA, 20 nt, Artificial Sequence
  HTT spacer sequence GTCN PAM
cccagcuuacacagguagca

SEQ ID NO: 24390 - RNA, 20 nt, Artificial Sequence
  HTT spacer sequence GTCN PAM
caaaaaaaaaaaaguaaaga

SEQ ID NO: 24391 - RNA, 20 nt, Artificial Sequence
  HTT spacer sequence GTCN PAM
ugcucuguugcccaggcuag

SEQ ID NO: 24392 - RNA, 20 nt, Artificial Sequence
  HTT spacer sequence GTCN PAM
cagcuacuugggaggcuggg

SEQ ID NO: 24393 - RNA, 20 nt, Artificial Sequence
  HTT spacer sequence GTCN PAM
ugaucuccugaccucgugau

SEQ ID NO: 24394 - RNA, 20 nt, Artificial Sequence
  HTT spacer sequence GTCN PAM
ggagaucaagaccauccugg

SEQ ID NO: 24395 - RNA, 20 nt, Artificial Sequence
  HTT spacer sequence GTCN PAM
uuucacaaaaaaaguaaaga

SEQ ID NO: 24396 - RNA, 20 nt, Artificial Sequence
  HTT spacer sequence GTCN PAM
uuguucaucugaucuccacc

SEQ ID NO: 24397 - RNA, 20 nt, Artificial Sequence
  HTT spacer sequence GTCN PAM
cagagaacauaauuucucuc

SEQ ID NO: 24398 - RNA, 20 nt, Artificial Sequence
  HTT spacer sequence GTCN PAM
auaagcuuucagagagaaau

SEQ ID NO: 24399 - RNA, 20 nt, Artificial Sequence
  HTT spacer sequence GTCN PAM
ggcuuuauucuugucauuuu

SEQ ID NO: 24400 - RNA, 20 nt, Artificial Sequence
  HTT spacer sequence GTCN PAM
uuuugucuuuugauaauuuu

SEQ ID NO: 24401 - RNA, 20 nt, Artificial Sequence
  HTT spacer sequence GTCN PAM
uuugauaauuuucaaaugga

SEQ ID NO: 24402 - RNA, 20 nt, Artificial Sequence
  HTT spacer sequence GTCN PAM
caacauacuuuacuaauaua

SEQ ID NO: 24403 - RNA, 20 nt, Artificial Sequence
  HTT spacer sequence GTCN PAM
gucucuuguuuuuauggagu

SEQ ID NO: 24404 - RNA, 20 nt, Artificial Sequence
  HTT spacer sequence GTCN PAM
cuuguuuuuauggaguaaug

SEQ ID NO: 24405 - RNA, 20 nt, Artificial Sequence
  HTT spacer sequence GTCN PAM
gagagguuauucuugguuuc

SEQ ID NO: 24406 - RNA, 20 nt, Artificial Sequence
  HTT spacer sequence GTCN PAM
agcacaaaagcuauaaaaaa

SEQ ID NO: 24407 - RNA, 20 nt, Artificial Sequence
  HTT spacer sequence GTCN PAM
cuaaugagguuauauaaaug

SEQ ID NO: 24408 - RNA, 20 nt, Artificial Sequence
  HTT spacer sequence GTCN PAM
gaagcugccauuuauauaac

SEQ ID NO: 24409 - RNA, 20 nt, Artificial Sequence
  HTT spacer sequence GTCN PAM
uuuaaaacuucauguauauu

SEQ ID NO: 24410 - RNA, 20 nt, Artificial Sequence
  HTT spacer sequence GTCN PAM
gcuuuaagcucucuaaagug

SEQ ID NO: 24411 - RNA, 20 nt, Artificial Sequence
  HTT spacer sequence GTCN PAM
aaguuacugguuccuaagua

SEQ ID NO: 24412 - RNA, 20 nt, Artificial Sequence
  HTT spacer sequence GTCN PAM
uuuuucccaaacauacuucu

SEQ ID NO: 24413 - RNA, 20 nt, Artificial Sequence
  HTT spacer sequence GTCN PAM
cuaccuacucaaacagaaug

SEQ ID NO: 24414 - RNA, 20 nt, Artificial Sequence
  HTT spacer sequence GTCN PAM
ccuauaucuuucagaaacau

SEQ ID NO: 24415 - RNA, 20 nt, Artificial Sequence
  HTT spacer sequence GTCN PAM
agaguuugagaccagcugga

SEQ ID NO: 24416 - RNA, 20 nt, Artificial Sequence
  HTT spacer sequence GTCN PAM
caaacucuugaccucaggug

SEQ ID NO: 24417 - RNA, 20 nt, Artificial Sequence
  HTT spacer sequence GTCN PAM
agcuggucucaaacucuuga

SEQ ID NO: 24418 - RNA, 20 nt, Artificial Sequence
  HTT spacer sequence GTCN PAM
cagcuacuugggaggcugag

SEQ ID NO: 24419 - RNA, 20 nt, Artificial Sequence
  HTT spacer sequence GTCN PAM
cccaggcuggaaugcagugg

SEQ ID NO: 24420 - RNA, 20 nt, Artificial Sequence
  HTT spacer sequence GTCN PAM
caagaaaaaagagaaaaaag

SEQ ID NO: 24421 - RNA, 20 nt, Artificial Sequence
  HTT spacer sequence GTCN PAM
caccauauuaguguugauuu

SEQ ID NO: 24422 - RNA, 20 nt, Artificial Sequence
  HTT spacer sequence GTCN PAM
cauacauuaagucucaccau

SEQ ID NO: 24423 - RNA, 20 nt, Artificial Sequence
  HTT spacer sequence GTCN PAM
gagaaauguaucauuucccu

SEQ ID NO: 24424 - RNA, 20 nt, Artificial Sequence
  HTT spacer sequence GTCN PAM
aaauccaccuucaacaaaau

SEQ ID NO: 24425 - RNA, 20 nt, Artificial Sequence
  HTT spacer sequence GTCN PAM
auacuuuccccaaguucaau

SEQ ID NO: 24426 - RNA, 20 nt, Artificial Sequence
  HTT spacer sequence GTCN PAM
accugucggcaccuuguucu

SEQ ID NO: 24427 - RNA, 20 nt, Artificial Sequence
  HTT spacer sequence GTCN PAM
acaguguuuuucuuaacgau

SEQ ID NO: 24428 - RNA, 20 nt, Artificial Sequence
  HTT spacer sequence GTCN PAM
gcaccuuguucuccgacucc

SEQ ID NO: 24429 - RNA, 20 nt, Artificial Sequence
  HTT spacer sequence GTCN PAM
gagaacaaggugccgacagg

SEQ ID NO: 24430 - RNA, 20 nt, Artificial Sequence
  HTT spacer sequence GTCN PAM
caguucuggaggcugggagu

SEQ ID NO: 24431 - RNA, 20 nt, Artificial Sequence
  HTT spacer sequence GTCN PAM
guaugugguauuuuguuaua

SEQ ID NO: 24432 - RNA, 20 nt, Artificial Sequence
  HTT spacer sequence GTCN PAM
uaaucagcuugaguuucuau

SEQ ID NO: 24433 - RNA, 20 nt, Artificial Sequence
  HTT spacer sequence GTCN PAM
acugauuacuaguguccuaa

SEQ ID NO: 24434 - RNA, 20 nt, Artificial Sequence
  HTT spacer sequence GTCN PAM
aauuggcaaacauuaagaau

SEQ ID NO: 24435 - RNA, 20 nt, Artificial Sequence
  HTT spacer sequence GTCN PAM
gaggugauacaaccuucuaa

SEQ ID NO: 24436 - RNA, 20 nt, Artificial Sequence
  HTT spacer sequence GTCN PAM
gaccuagcaguuuuaccucu

SEQ ID NO: 24437 - RNA, 20 nt, Artificial Sequence
  HTT spacer sequence GTCN PAM
gacauauaauaaucuaaagc

SEQ ID NO: 24438 - RNA, 20 nt, Artificial Sequence
  HTT spacer sequence GTCN PAM
ugcacuguccgccugggcca

SEQ ID NO: 24439 - RNA, 20 nt, Artificial Sequence
  HTT spacer sequence GTCN PAM
gccugggccagagugcaaug

SEQ ID NO: 24440 - RNA, 20 nt, Artificial Sequence
  HTT spacer sequence GTCN PAM
ggccaacacagugaaacccc

SEQ ID NO: 24441 - RNA, 20 nt, Artificial Sequence
  HTT spacer sequence GTCN PAM
cgaacuccugaccucaugau

SEQ ID NO: 24442 - RNA, 20 nt, Artificial Sequence
  HTT spacer sequence GTCN PAM
ggaguucgagaccagucugg

SEQ ID NO: 24443 - RNA, 20 nt, Artificial Sequence
  HTT spacer sequence GTCN PAM
cuaaaaaaaauuuuuuuaau

SEQ ID NO: 24444 - RNA, 20 nt, Artificial Sequence
  HTT spacer sequence GTCN PAM
cccaggcaggaugcaguugc

SEQ ID NO: 24445 - RNA, 20 nt, Artificial Sequence
  HTT spacer sequence GTCN PAM
cccagguacucaaaaggcug

SEQ ID NO: 24446 - RNA, 20 nt, Artificial Sequence
  HTT spacer sequence GTCN PAM
agaauuccugggcccaagug

SEQ ID NO: 24447 - RNA, 20 nt, Artificial Sequence
  HTT spacer sequence GTCN PAM
gaagugguggcucaugccug

SEQ ID NO: 24448 - RNA, 20 nt, Artificial Sequence
  HTT spacer sequence GTCN PAM
caaauauaaauaucuauugg

SEQ ID NO: 24449 - RNA, 20 nt, Artificial Sequence
  HTT spacer sequence GTCN PAM
uuguuauucuaucuuagcca

SEQ ID NO: 24450 - RNA, 20 nt, Artificial Sequence
  HTT spacer sequence GTCN PAM
uggcaagaggaaaaacugag

SEQ ID NO: 24451 - RNA, 20 nt, Artificial Sequence
  HTT spacer sequence GTCN PAM
ccucucaguuuuuccucuug

SEQ ID NO: 24452 - RNA, 20 nt, Artificial Sequence
  HTT spacer sequence GTCN PAM
ccggagcucccucugcagcu

SEQ ID NO: 24453 - RNA, 20 nt, Artificial Sequence
  HTT spacer sequence GTCN PAM
uguguguagcugaguacuga

SEQ ID NO: 24454 - RNA, 20 nt, Artificial Sequence
  HTT spacer sequence GTCN PAM
guacucagcuacacacauga

SEQ ID NO: 24455 - RNA, 20 nt, Artificial Sequence
  HTT spacer sequence GTCN PAM
uuuccgcacaagcaagugcu

SEQ ID NO: 24456 - RNA, 20 nt, Artificial Sequence
  HTT spacer sequence GTCN PAM
cacagggccaggaagaauuu

SEQ ID NO: 24457 - RNA, 20 nt, Artificial Sequence
  HTT spacer sequence GTCN PAM
ggggcuaggugggcaaaccc

SEQ ID NO: 24458 - RNA, 20 nt, Artificial Sequence
  HTT spacer sequence GTCN PAM
gaguaacgaaacuuagucug

SEQ ID NO: 24459 - RNA, 20 nt, Artificial Sequence
  HTT spacer sequence GTCN PAM
uacaauucacuucuacgugu

SEQ ID NO: 24460 - RNA, 20 nt, Artificial Sequence
  HTT spacer sequence GTCN PAM
auuucugcucuuccagccuu

SEQ ID NO: 24461 - RNA, 20 nt, Artificial Sequence
  HTT spacer sequence GTCN PAM
uaaucccuggagccuguaaa

SEQ ID NO: 24462 - RNA, 20 nt, Artificial Sequence
  HTT spacer sequence GTCN PAM
uaggacaauaguggagggaa

SEQ ID NO: 24463 - RNA, 20 nt, Artificial Sequence
  HTT spacer sequence GTCN PAM
uaugacccugccaaaucccc

SEQ ID NO: 24464 - RNA, 20 nt, Artificial Sequence
  HTT spacer sequence GTCN PAM
gcagauaaacauguaaacaa

SEQ ID NO: 24465 - RNA, 20 nt, Artificial Sequence
  HTT spacer sequence GTCN PAM
cugguuuuccuaggcagagg

SEQ ID NO: 24466 - RNA, 20 nt, Artificial Sequence
  HTT spacer sequence GTCN PAM
cuggguacuugagauuaggg

SEQ ID NO: 24467 - RNA, 20 nt, Artificial Sequence
  HTT spacer sequence GTCN PAM
ucaccacucccuaaucucaa

SEQ ID NO: 24468 - RNA, 20 nt, Artificial Sequence
  HTT spacer sequence GTCN PAM
acuaaggguuaaauggauua

SEQ ID NO: 24469 - RNA, 20 nt, Artificial Sequence
  HTT spacer sequence GTCN PAM
uaugucuacuucuuucuacg

SEQ ID NO: 24470 - RNA, 20 nt, Artificial Sequence
  HTT spacer sequence GTCN PAM
acuucuuucuacgcagacac

SEQ ID NO: 24471 - RNA, 20 nt, Artificial Sequence
  HTT spacer sequence GTCN PAM
gcguagaaagaaguagacau

SEQ ID NO: 24472 - RNA, 20 nt, Artificial Sequence
  HTT spacer sequence GTCN PAM
aauagaaaaggaggaaaugu

SEQ ID NO: 24473 - RNA, 20 nt, Artificial Sequence
  HTT spacer sequence GTCN PAM
ucauggacuguucucaauga

SEQ ID NO: 24474 - RNA, 20 nt, Artificial Sequence
  HTT spacer sequence GTCN PAM
augaugacgguggcaguuuu

SEQ ID NO: 24475 - RNA, 20 nt, Artificial Sequence
  HTT spacer sequence GTCN PAM
gggagguuggggggcgccuc

SEQ ID NO: 24476 - RNA, 20 nt, Artificial Sequence
  HTT spacer sequence GTCN PAM
gggagguggggggcagcccc

SEQ ID NO: 24477 - RNA, 20 nt, Artificial Sequence
  HTT spacer sequence GTCN PAM
gggagguggugggcagcccc

SEQ ID NO: 24478 - RNA, 20 nt, Artificial Sequence
  HTT spacer sequence GTCN PAM
gggagguggggggcagcccc

SEQ ID NO: 24479 - RNA, 20 nt, Artificial Sequence
  HTT spacer sequence GTCN PAM
gggagguggggggcagcccc

SEQ ID NO: 24480 - RNA, 20 nt, Artificial Sequence
  HTT spacer sequence GTCN PAM
gggagguggggggcagcccc

SEQ ID NO: 24481 - RNA, 20 nt, Artificial Sequence
  HTT spacer sequence GTCN PAM
gggaagugaggagccccucc

SEQ ID NO: 24482 - RNA, 20 nt, Artificial Sequence
  HTT spacer sequence GTCN PAM
gagaagugaggagccccucc

SEQ ID NO: 24483 - RNA, 20 nt, Artificial Sequence
  HTT spacer sequence GTCN PAM
gagacgcuccucaccuccca

SEQ ID NO: 24484 - RNA, 20 nt, Artificial Sequence
  HTT spacer sequence GTCN PAM
cugaccagccgccccgucug

SEQ ID NO: 24485 - RNA, 20 nt, Artificial Sequence
  HTT spacer sequence GTCN PAM
gggaggugaggagcgucucu

SEQ ID NO: 24486 - RNA, 20 nt, Artificial Sequence
  HTT spacer sequence GTCN PAM
cugccccacugccaccccgu

SEQ ID NO: 24487 - RNA, 20 nt, Artificial Sequence
  HTT spacer sequence GTCN PAM
gggaacuuaagaaugucucu

SEQ ID NO: 24488 - RNA, 20 nt, Artificial Sequence
  HTT spacer sequence GTCN PAM
cggccgggcagaggugcucu

SEQ ID NO: 24489 - RNA, 20 nt, Artificial Sequence
  HTT spacer sequence GTCN PAM
gagaugugaagagcaccucu

SEQ ID NO: 24490 - RNA, 20 nt, Artificial Sequence
  HTT spacer sequence GTCN PAM
gggaaguggggagcaccucu

SEQ ID NO: 24491 - RNA, 20 nt, Artificial Sequence
  HTT spacer sequence GTCN PAM
ucccaucuaggaagugagga

SEQ ID NO: 24492 - RNA, 20 nt, Artificial Sequence
  HTT spacer sequence GTCN PAM
gggaagugaggagcgccucu

SEQ ID NO: 24493 - RNA, 20 nt, Artificial Sequence
  HTT spacer sequence GTCN PAM
gggaugugaggagccccucu

SEQ ID NO: 24494 - RNA, 20 nt, Artificial Sequence
  HTT spacer sequence GTCN PAM
aggaagugaggagcguuucu

SEQ ID NO: 24495 - RNA, 20 nt, Artificial Sequence
  HTT spacer sequence GTCN PAM
cuacaaccuucaccucccag

SEQ ID NO: 24496 - RNA, 20 nt, Artificial Sequence
  HTT spacer sequence GTCN PAM
cgcucacucagugcucagug

SEQ ID NO: 24497 - RNA, 20 nt, Artificial Sequence
  HTT spacer sequence GTCN PAM
gcaaucccggcaccucggga

SEQ ID NO: 24498 - RNA, 20 nt, Artificial Sequence
  HTT spacer sequence GTCN PAM
ggagcuggagaccagcccgg

SEQ ID NO: 24499 - RNA, 20 nt, Artificial Sequence
  HTT spacer sequence GTCN PAM
ccagcuccugacugcaagug

SEQ ID NO: 24500 - RNA, 20 nt, Artificial Sequence
  HTT spacer sequence GTCN PAM
ccaccaaaaaacacgaaaac

SEQ ID NO: 24501 - RNA, 20 nt, Artificial Sequence
  HTT spacer sequence GTCN PAM
gacauggcggugcgugccug

SEQ ID NO: 24502 - RNA, 20 nt, Artificial Sequence
  HTT spacer sequence GTCN PAM
gacugguuuucguguuuuuu

SEQ ID NO: 24503 - RNA, 20 nt, Artificial Sequence
  HTT spacer sequence GTCN PAM
agccuuggcucggcaucaga

SEQ ID NO: 24504 - RNA, 20 nt, Artificial Sequence
  HTT spacer sequence GTCN PAM
cccucugaugccgagccaag

SEQ ID NO: 24505 - RNA, 20 nt, Artificial Sequence
  HTT spacer sequence GTCN PAM
aaaauuaguaucacuaaacu

SEQ ID NO: 24506 - RNA, 20 nt, Artificial Sequence
  HTT spacer sequence GTCN PAM
aaaaggacauuacauguaaa

SEQ ID NO: 24507 - RNA, 20 nt, Artificial Sequence
  HTT spacer sequence GTCN PAM
uuuuugacauaguuagguug

SEQ ID NO: 24508 - RNA, 20 nt, Artificial Sequence
  HTT spacer sequence GTCN PAM
uacuuuuccauucaaucuga

SEQ ID NO: 24509 - RNA, 20 nt, Artificial Sequence
  HTT spacer sequence GTCN PAM
agcuugcaucuaauucuugu

SEQ ID NO: 24510 - RNA, 20 nt, Artificial Sequence
  HTT spacer sequence GTCN PAM
gauauuaacagaaccagucu

SEQ ID NO: 24511 - RNA, 20 nt, Artificial Sequence
  HTT spacer sequence GTCN PAM
uuucauaaugaugaagggga

SEQ ID NO: 24512 - RNA, 20 nt, Artificial Sequence
  HTT spacer sequence GTCN PAM
ggugcauaaacauuucagcu

SEQ ID NO: 24513 - RNA, 20 nt, Artificial Sequence
  HTT spacer sequence GTCN PAM
ggcuuugcuucauguauuuu

SEQ ID NO: 24514 - RNA, 20 nt, Artificial Sequence
  HTT spacer sequence GTCN PAM
guuucuacuuguaguucugu

SEQ ID NO: 24515 - RNA, 20 nt, Artificial Sequence
  HTT spacer sequence GTCN PAM
aguguucuagauccagauau

SEQ ID NO: 24516 - RNA, 20 nt, Artificial Sequence
  HTT spacer sequence GTCN PAM
ccugugcaaccucauuggca

SEQ ID NO: 24517 - RNA, 20 nt, Artificial Sequence
  HTT spacer sequence GTCN PAM
uguaaaugccaaugagguug

SEQ ID NO: 24518 - RNA, 20 nt, Artificial Sequence
  HTT spacer sequence GTCN PAM
cuucugcuggugcugggugg

SEQ ID NO: 24519 - RNA, 20 nt, Artificial Sequence
  HTT spacer sequence GTCN PAM
cuaaauuaaaagcauucaaa

SEQ ID NO: 24520 - RNA, 20 nt, Artificial Sequence
  HTT spacer sequence GTCN PAM
gaaaacauacucugaauaau

SEQ ID NO: 24521 - RNA, 20 nt, Artificial Sequence
  HTT spacer sequence GTCN PAM
gaagugaagucaaaagggaa

SEQ ID NO: 24522 - RNA, 20 nt, Artificial Sequence
  HTT spacer sequence GTCN PAM
aaagggaaauuugaaagucu

SEQ ID NO: 24523 - RNA, 20 nt, Artificial Sequence
  HTT spacer sequence GTCN PAM
uuuggauugacugauauaaa

SEQ ID NO: 24524 - RNA, 20 nt, Artificial Sequence
  HTT spacer sequence GTCN PAM
auccaaaagacuuucaaauu

SEQ ID NO: 24525 - RNA, 20 nt, Artificial Sequence
  HTT spacer sequence GTCN PAM
uugauuugaaaucuuucuuu

SEQ ID NO: 24526 - RNA, 20 nt, Artificial Sequence
  HTT spacer sequence GTCN PAM
uuuucaaguuuccaaaggua

SEQ ID NO: 24527 - RNA, 20 nt, Artificial Sequence
  HTT spacer sequence GTCN PAM
caaacaauccaccugccucg

SEQ ID NO: 24528 - RNA, 20 nt, Artificial Sequence
  HTT spacer sequence GTCN PAM
ucaacugccagucucaaaca

SEQ ID NO: 24529 - RNA, 20 nt, Artificial Sequence
  HTT spacer sequence GTCN PAM
cccuaggcugcccaggcugg

SEQ ID NO: 24530 - RNA, 20 nt, Artificial Sequence
  HTT spacer sequence GTCN PAM
cagcuaaccaggagucuaag

SEQ ID NO: 24531 - RNA, 20 nt, Artificial Sequence
  HTT spacer sequence GTCN PAM
aaggugggaggauugcuuga

SEQ ID NO: 24532 - RNA, 20 nt, Artificial Sequence
  HTT spacer sequence GTCN PAM
gggagguugaggcugcagug

SEQ ID NO: 24533 - RNA, 20 nt, Artificial Sequence
  HTT spacer sequence GTCN PAM
cauucuguugcccaggaugg

SEQ ID NO: 24534 - RNA, 20 nt, Artificial Sequence
  HTT spacer sequence GTCN PAM
caaaaacaaaaacaguuacu

SEQ ID NO: 24535 - RNA, 20 nt, Artificial Sequence
  HTT spacer sequence GTCN PAM
auucuucuaguaacuguuuu

SEQ ID NO: 24536 - RNA, 20 nt, Artificial Sequence
  HTT spacer sequence GTCN PAM
guaaaauagaaaacaaaaau

SEQ ID NO: 24537 - RNA, 20 nt, Artificial Sequence
  HTT spacer sequence GTCN PAM
caaauuagcaauaucaggaa

SEQ ID NO: 24538 - RNA, 20 nt, Artificial Sequence
  HTT spacer sequence GTCN PAM
ucucccucauuccugauauu

SEQ ID NO: 24539 - RNA, 20 nt, Artificial Sequence
  HTT spacer sequence GTCN PAM
uuuuaauaucuauauaaucu

SEQ ID NO: 24540 - RNA, 20 nt, Artificial Sequence
  HTT spacer sequence GTCN PAM
accucggccucccaaggugc

SEQ ID NO: 24541 - RNA, 20 nt, Artificial Sequence
  HTT spacer sequence GTCN PAM
ggaguuugggaccagccugg

SEQ ID NO: 24542 - RNA, 20 nt, Artificial Sequence
  HTT spacer sequence GTCN PAM
caaacuccugaccucaggug

SEQ ID NO: 24543 - RNA, 20 nt, Artificial Sequence
  HTT spacer sequence GTCN PAM
cuacuaaaaauacaaaaauu

SEQ ID NO: 24544 - RNA, 20 nt, Artificial Sequence
  HTT spacer sequence GTCN PAM
uggugcugugugccuguaau

SEQ ID NO: 24545 - RNA, 20 nt, Artificial Sequence
  HTT spacer sequence GTCN PAM
cccaggcuggagugcaacgg

SEQ ID NO: 24546 - RNA, 20 nt, Artificial Sequence
  HTT spacer sequence GTCN PAM
ugcucugucacccaggcugg

SEQ ID NO: 24547 - RNA, 20 nt, Artificial Sequence
  HTT spacer sequence GTCN PAM
uuuuuauuuauuuauuuguu

SEQ ID NO: 24548 - RNA, 20 nt, Artificial Sequence
  HTT spacer sequence GTCN PAM
aauuuauuggcauaaaguug

SEQ ID NO: 24549 - RNA, 20 nt, Artificial Sequence
  HTT spacer sequence GTCN PAM
uucaaggaacucauccauuu

SEQ ID NO: 24550 - RNA, 20 nt, Artificial Sequence
  HTT spacer sequence GTCN PAM
aaucacagguaaagguuuuc

SEQ ID NO: 24551 - RNA, 20 nt, Artificial Sequence
  HTT spacer sequence GTCN PAM
gaauugagauauacuguaaa

SEQ ID NO: 24552 - RNA, 20 nt, Artificial Sequence
  HTT spacer sequence GTCN PAM
gcuaggaaauauaaaagugu

SEQ ID NO: 24553 - RNA, 20 nt, Artificial Sequence
  HTT spacer sequence GTCN PAM
acagaaacagaaugugagcu

SEQ ID NO: 24554 - RNA, 20 nt, Artificial Sequence
  HTT spacer sequence GTCN PAM
uugaaaugauagaucauuca

SEQ ID NO: 24555 - RNA, 20 nt, Artificial Sequence
  HTT spacer sequence GTCN PAM
guauuccacauagauaaggu

SEQ ID NO: 24556 - RNA, 20 nt, Artificial Sequence
  HTT spacer sequence GTCN PAM
gaaauacugcuaaguggcau

SEQ ID NO: 24557 - RNA, 20 nt, Artificial Sequence
  HTT spacer sequence GTCN PAM
acaucaguaaugaucaacaa

SEQ ID NO: 24558 - RNA, 20 nt, Artificial Sequence
  HTT spacer sequence GTCN PAM
cuuucucuuuaucucuaggu

SEQ ID NO: 24559 - RNA, 20 nt, Artificial Sequence
  HTT spacer sequence GTCN PAM
guuucauguacauggcucau

SEQ ID NO: 24560 - RNA, 20 nt, Artificial Sequence
  HTT spacer sequence GTCN PAM
aaacaaagccaagagagagc

SEQ ID NO: 24561 - RNA, 20 nt, Artificial Sequence
  HTT spacer sequence GTCN PAM
caaaaacuggaguuuguuua

SEQ ID NO: 24562 - RNA, 20 nt, Artificial Sequence
  HTT spacer sequence GTCN PAM
cgcacaacaaaaacacaauc

SEQ ID NO: 24563 - RNA, 20 nt, Artificial Sequence
  HTT spacer sequence GTCN PAM
gauuguguuuuuguugugcg

SEQ ID NO: 24564 - RNA, 20 nt, Artificial Sequence
  HTT spacer sequence GTCN PAM
aucucuccugccccuuuuua

SEQ ID NO: 24565 - RNA, 20 nt, Artificial Sequence
  HTT spacer sequence GTCN PAM
aggauugaaguaucugaagu

SEQ ID NO: 24566 - RNA, 20 nt, Artificial Sequence
  HTT spacer sequence GTCN PAM
cacacuaaauuaggaugaua

SEQ ID NO: 24567 - RNA, 20 nt, Artificial Sequence
  HTT spacer sequence GTCN PAM
agacuuuauucagauuuucu

SEQ ID NO: 24568 - RNA, 20 nt, Artificial Sequence
  HTT spacer sequence GTCN PAM
ggacuuaaguuaauagcaua

SEQ ID NO: 24569 - RNA, 20 nt, Artificial Sequence
  HTT spacer sequence GTCN PAM
uuuuucuguuccagaauucc

SEQ ID NO: 24570 - RNA, 20 nt, Artificial Sequence
  HTT spacer sequence GTCN PAM
ugcauggaauucuggaacag

SEQ ID NO: 24571 - RNA, 20 nt, Artificial Sequence
  HTT spacer sequence GTCN PAM
ugucaccuuaggcuccucuu

SEQ ID NO: 24572 - RNA, 20 nt, Artificial Sequence
  HTT spacer sequence GTCN PAM
ccuuaggcuccucuugacag

SEQ ID NO: 24573 - RNA, 20 nt, Artificial Sequence
  HTT spacer sequence GTCN PAM
agaggagccuaaggugacau

SEQ ID NO: 24574 - RNA, 20 nt, Artificial Sequence
  HTT spacer sequence GTCN PAM
ucacugcacagcagaaaaag

SEQ ID NO: 24575 - RNA, 20 nt, Artificial Sequence
  HTT spacer sequence GTCN PAM
gaugucaggaugguggcuga

SEQ ID NO: 24576 - RNA, 20 nt, Artificial Sequence
  HTT spacer sequence GTCN PAM
ggaugguggcugacgaaugc

SEQ ID NO: 24577 - RNA, 20 nt, Artificial Sequence
  HTT spacer sequence GTCN PAM
gccaccauccugacaucuga

SEQ ID NO: 24578 - RNA, 20 nt, Artificial Sequence
  HTT spacer sequence GTCN PAM
cugaggaugucugcacuuuu

SEQ ID NO: 24579 - RNA, 20 nt, Artificial Sequence
  HTT spacer sequence GTCN PAM
gcacuuuuuuccuuucugau

SEQ ID NO: 24580 - RNA, 20 nt, Artificial Sequence
  HTT spacer sequence GTCN PAM
uguaugguuugcaggugcuc

SEQ ID NO: 24581 - RNA, 20 nt, Artificial Sequence
  HTT spacer sequence GTCN PAM
gaaggcgcuauguugacaau

SEQ ID NO: 24582 - RNA, 20 nt, Artificial Sequence
  HTT spacer sequence GTCN PAM
acauagcgccuucugaccgg

SEQ ID NO: 24583 - RNA, 20 nt, Artificial Sequence
  HTT spacer sequence GTCN PAM
augaagggaaccgaugguag

SEQ ID NO: 24584 - RNA, 20 nt, Artificial Sequence
  HTT spacer sequence GTCN PAM
cuacaggcaccagagaagcc

SEQ ID NO: 24585 - RNA, 20 nt, Artificial Sequence
  HTT spacer sequence GTCN PAM
caguuuucuuaaccauaaaa

SEQ ID NO: 24586 - RNA, 20 nt, Artificial Sequence
  HTT spacer sequence GTCN PAM
guguaugugugaggauuaaa

SEQ ID NO: 24587 - RNA, 20 nt, Artificial Sequence
  HTT spacer sequence GTCN PAM
ucacacauacacaauuuaau

SEQ ID NO: 24588 - RNA, 20 nt, Artificial Sequence
  HTT spacer sequence GTCN PAM
uuauuaauaagaacacuucu

SEQ ID NO: 24589 - RNA, 20 nt, Artificial Sequence
  HTT spacer sequence GTCN PAM
ggacgcuggcuucucuggag

SEQ ID NO: 24590 - RNA, 20 nt, Artificial Sequence
  HTT spacer sequence GTCN PAM
ugaccacagaaagcgugauu

SEQ ID NO: 24591 - RNA, 20 nt, Artificial Sequence
  HTT spacer sequence GTCN PAM
ugucccuagaguggucacug

SEQ ID NO: 24592 - RNA, 20 nt, Artificial Sequence
  HTT spacer sequence GTCN PAM
cuagaguggucacugucuuc

SEQ ID NO: 24593 - RNA, 20 nt, Artificial Sequence
  HTT spacer sequence GTCN PAM
cugucuucucucuccgcuug

SEQ ID NO: 24594 - RNA, 20 nt, Artificial Sequence
  HTT spacer sequence GTCN PAM
ucucucuccgcuugcaauuc

SEQ ID NO: 24595 - RNA, 20 nt, Artificial Sequence
  HTT spacer sequence GTCN PAM
cugcauaagugagaugcgag

SEQ ID NO: 24596 - RNA, 20 nt, Artificial Sequence
  HTT spacer sequence GTCN PAM
ugccagugagaauaaaagaa

SEQ ID NO: 24597 - RNA, 20 nt, Artificial Sequence
  HTT spacer sequence GTCN PAM
gucuuugcaugagacagggu

SEQ ID NO: 24598 - RNA, 20 nt, Artificial Sequence
  HTT spacer sequence GTCN PAM
uugcaugagacagggucucg

SEQ ID NO: 24599 - RNA, 20 nt, Artificial Sequence
  HTT spacer sequence GTCN PAM
caugcaaagacagaccgccc

SEQ ID NO: 24600 - RNA, 20 nt, Artificial Sequence
  HTT spacer sequence GTCN PAM
cgcucagucacccaggcugg

SEQ ID NO: 24601 - RNA, 20 nt, Artificial Sequence
  HTT spacer sequence GTCN PAM
cccaggcuggagugcagugg

SEQ ID NO: 24602 - RNA, 20 nt, Artificial Sequence
  HTT spacer sequence GTCN PAM
cagcuacucaaggggccaag

SEQ ID NO: 24603 - RNA, 20 nt, Artificial Sequence
  HTT spacer sequence GTCN PAM
ugaacgccugggcucaagug

SEQ ID NO: 24604 - RNA, 20 nt, Artificial Sequence
  HTT spacer sequence GTCN PAM
gaaaaucuaaaaagagggcu

SEQ ID NO: 24605 - RNA, 20 nt, Artificial Sequence
  HTT spacer sequence GTCN PAM
cauuugccaugaaccaaggc

SEQ ID NO: 24606 - RNA, 20 nt, Artificial Sequence
  HTT spacer sequence GTCN PAM
uuuaauguguaaguauuguu

SEQ ID NO: 24607 - RNA, 20 nt, Artificial Sequence
  HTT spacer sequence GTCN PAM
agcaauuccuggaaaaaaaa

SEQ ID NO: 24608 - RNA, 20 nt, Artificial Sequence
  HTT spacer sequence GTCN PAM
gaggacuguaggccauggcc

SEQ ID NO: 24609 - RNA, 20 nt, Artificial Sequence
  HTT spacer sequence GTCN PAM
ucagacacacaccaagccac

SEQ ID NO: 24610 - RNA, 20 nt, Artificial Sequence
  HTT spacer sequence GTCN PAM
caggugcucuuccuggcugu

SEQ ID NO: 24611 - RNA, 20 nt, Artificial Sequence
  HTT spacer sequence GTCN PAM
ccuugcuucuuucccauguc

SEQ ID NO: 24612 - RNA, 20 nt, Artificial Sequence
  HTT spacer sequence GTCN PAM
ucuucuuuguuuccagccau

SEQ ID NO: 24613 - RNA, 20 nt, Artificial Sequence
  HTT spacer sequence GTCN PAM
ggcccagcgggcuggcagcg

SEQ ID NO: 24614 - RNA, 20 nt, Artificial Sequence
  HTT spacer sequence GTCN PAM
cacgugcucucccacgccuc

SEQ ID NO: 24615 - RNA, 20 nt, Artificial Sequence
  HTT spacer sequence GTCN PAM
cguagccuucagguccuaga

SEQ ID NO: 24616 - RNA, 20 nt, Artificial Sequence
  HTT spacer sequence GTCN PAM
uagacuuugucuucucauga

SEQ ID NO: 24617 - RNA, 20 nt, Artificial Sequence
  HTT spacer sequence GTCN PAM
aggaccugaaggcuacguga

SEQ ID NO: 24618 - RNA, 20 nt, Artificial Sequence
  HTT spacer sequence GTCN PAM
ucucaugaguauggcugugu

SEQ ID NO: 24619 - RNA, 20 nt, Artificial Sequence
  HTT spacer sequence GTCN PAM
gauacccagugcauuucucu

SEQ ID NO: 24620 - RNA, 20 nt, Artificial Sequence
  HTT spacer sequence GTCN PAM
caggcggugaagcacgugug

SEQ ID NO: 24621 - RNA, 20 nt, Artificial Sequence
  HTT spacer sequence GTCN PAM
agcaagaacuucauaugugg

SEQ ID NO: 24622 - RNA, 20 nt, Artificial Sequence
  HTT spacer sequence GTCN PAM
ccguucugugaggugcuggc

SEQ ID NO: 24623 - RNA, 20 nt, Artificial Sequence
  HTT spacer sequence GTCN PAM
agaggcugaagugauuuuug

SEQ ID NO: 24624 - RNA, 20 nt, Artificial Sequence
  HTT spacer sequence GTCN PAM
agggaggcaggaaaggcuuc

SEQ ID NO: 24625 - RNA, 20 nt, Artificial Sequence
  HTT spacer sequence GTCN PAM
gcagccaguaggugaaagag

SEQ ID NO: 24626 - RNA, 20 nt, Artificial Sequence
  HTT spacer sequence GTCN PAM
ccaaucuacucuuucaccua

SEQ ID NO: 24627 - RNA, 20 nt, Artificial Sequence
  HTT spacer sequence GTCN PAM
caaggggugccaggaagcug

SEQ ID NO: 24628 - RNA, 20 nt, Artificial Sequence
  HTT spacer sequence GTCN PAM
cacucucuggcagcauaaga

SEQ ID NO: 24629 - RNA, 20 nt, Artificial Sequence
  HTT spacer sequence GTCN PAM
ggucaagggguuguaccuug

SEQ ID NO: 24630 - RNA, 20 nt, Artificial Sequence
  HTT spacer sequence GTCN PAM
agggguuguaccuuguuugg

SEQ ID NO: 24631 - RNA, 20 nt, Artificial Sequence
  HTT spacer sequence GTCN PAM
ucaagagccccuaauucucu

SEQ ID NO: 24632 - RNA, 20 nt, Artificial Sequence
  HTT spacer sequence GTCN PAM
ggggaguguaucauuuagga

SEQ ID NO: 24633 - RNA, 20 nt, Artificial Sequence
  HTT spacer sequence GTCN PAM
cucuuccuaaaugauacacu

SEQ ID NO: 24634 - RNA, 20 nt, Artificial Sequence
  HTT spacer sequence GTCN PAM
ucaccgggucacucuuccua

SEQ ID NO: 24635 - RNA, 20 nt, Artificial Sequence
  HTT spacer sequence GTCN PAM
uccucuaccccacguccuca

SEQ ID NO: 24636 - RNA, 20 nt, Artificial Sequence
  HTT spacer sequence GTCN PAM
aggugggagugaguagaccc

SEQ ID NO: 24637 - RNA, 20 nt, Artificial Sequence
  HTT spacer sequence GTCN PAM
acucacucccaccuggacuc

SEQ ID NO: 24638 - RNA, 20 nt, Artificial Sequence
  HTT spacer sequence GTCN PAM
gcggaagcaggggcaagagg

SEQ ID NO: 24639 - RNA, 20 nt, Artificial Sequence
  HTT spacer sequence GTCN PAM
cugggugauggcagcacgcu

SEQ ID NO: 24640 - RNA, 20 nt, Artificial Sequence
  HTT spacer sequence GTCN PAM
cucacaaucuacgccagucg

SEQ ID NO: 24641 - RNA, 20 nt, Artificial Sequence
  HTT spacer sequence GTCN PAM
aauucgcuuugcucauuuaa

SEQ ID NO: 24642 - RNA, 20 nt, Artificial Sequence
  HTT spacer sequence GTCN PAM
uuaaaugagcaaagcgaauu

SEQ ID NO: 24643 - RNA, 20 nt, Artificial Sequence
  HTT spacer sequence GTCN PAM
gcaagcuugaaaaucaaaac

SEQ ID NO: 24644 - RNA, 20 nt, Artificial Sequence
  HTT spacer sequence GTCN PAM
ucguaaaacuuguggguuaa

SEQ ID NO: 24645 - RNA, 20 nt, Artificial Sequence
  HTT spacer sequence GTCN PAM
acuuacaucaacugcccaug

SEQ ID NO: 24646 - RNA, 20 nt, Artificial Sequence
  HTT spacer sequence GTCN PAM
augaucucuuuaaccguggc

SEQ ID NO: 24647 - RNA, 20 nt, Artificial Sequence
  HTT spacer sequence GTCN PAM
ucccugucccauccccuagc

SEQ ID NO: 24648 - RNA, 20 nt, Artificial Sequence
  HTT spacer sequence GTCN PAM
cauccccuagcuugagaagc

SEQ ID NO: 24649 - RNA, 20 nt, Artificial Sequence
  HTT spacer sequence GTCN PAM
acauuagagaagggcuucuc

SEQ ID NO: 24650 - RNA, 20 nt, Artificial Sequence
  HTT spacer sequence GTCN PAM
acuucaagcuaguaacgaug

SEQ ID NO: 24651 - RNA, 20 nt, Artificial Sequence
  HTT spacer sequence GTCN PAM
agauggucaacuucaagcua

SEQ ID NO: 24652 - RNA, 20 nt, Artificial Sequence
  HTT spacer sequence GTCN PAM
ggggggcagggaccacgggc

SEQ ID NO: 24653 - RNA, 20 nt, Artificial Sequence
  HTT spacer sequence GTCN PAM
cugccccccugacccagagc

SEQ ID NO: 24654 - RNA, 20 nt, Artificial Sequence
  HTT spacer sequence GTCN PAM
gguaugcccguggucccugc

SEQ ID NO: 24655 - RNA, 20 nt, Artificial Sequence
  HTT spacer sequence GTCN PAM
ugcauccuuuucugcaggug

SEQ ID NO: 24656 - RNA, 20 nt, Artificial Sequence
  HTT spacer sequence GTCN PAM
gugguuuauaaguacaccca

SEQ ID NO: 24657 - RNA, 20 nt, Artificial Sequence
  HTT spacer sequence GTCN PAM
cgagcacuguggguguacuu

SEQ ID NO: 24658 - RNA, 20 nt, Artificial Sequence
  HTT spacer sequence GTCN PAM
agggugccgucugagcccgu

SEQ ID NO: 24659 - RNA, 20 nt, Artificial Sequence
  HTT spacer sequence GTCN PAM
gagcccguaucauccaacag

SEQ ID NO: 24660 - RNA, 20 nt, Artificial Sequence
  HTT spacer sequence GTCN PAM
cuacuaaaaaauacaaaaau

SEQ ID NO: 24661 - RNA, 20 nt, Artificial Sequence
  HTT spacer sequence GTCN PAM
ggcuggucuugaacuccuga

SEQ ID NO: 24662 - RNA, 20 nt, Artificial Sequence
  HTT spacer sequence GTCN PAM
ugaacuccugaccucaggug

SEQ ID NO: 24663 - RNA, 20 nt, Artificial Sequence
  HTT spacer sequence GTCN PAM
ggaguucaagaccagccuga

SEQ ID NO: 24664 - RNA, 20 nt, Artificial Sequence
  HTT spacer sequence GTCN PAM
uucacuuaaacagaaaaaug

SEQ ID NO: 24665 - RNA, 20 nt, Artificial Sequence
  HTT spacer sequence GTCN PAM
uccauaaaucucuugugauu

SEQ ID NO: 24666 - RNA, 20 nt, Artificial Sequence
  HTT spacer sequence GTCN PAM
caaaaauaaaauaaaauaag

SEQ ID NO: 24667 - RNA, 20 nt, Artificial Sequence
  HTT spacer sequence GTCN PAM
ugcuuucacccaugcuagag

SEQ ID NO: 24668 - RNA, 20 nt, Artificial Sequence
  HTT spacer sequence GTCN PAM
ugccacuguacucuagcaug

SEQ ID NO: 24669 - RNA, 20 nt, Artificial Sequence
  HTT spacer sequence GTCN PAM
caaacuccugaccucaggug

SEQ ID NO: 24670 - RNA, 20 nt, Artificial Sequence
  HTT spacer sequence GTCN PAM
ggaguuugagaccagcccaa

SEQ ID NO: 24671 - RNA, 20 nt, Artificial Sequence
  HTT spacer sequence GTCN PAM
gggcacaguggcucaugccu

SEQ ID NO: 24672 - RNA, 20 nt, Artificial Sequence
  HTT spacer sequence GTCN PAM
cgaacuccugaucucaggug

SEQ ID NO: 24673 - RNA, 20 nt, Artificial Sequence
  HTT spacer sequence GTCN PAM
cuacuaaaaauacaaaaauu

SEQ ID NO: 24674 - RNA, 20 nt, Artificial Sequence
  HTT spacer sequence GTCN PAM
cucaggcuggaaugcagugg

SEQ ID NO: 24675 - RNA, 20 nt, Artificial Sequence
  HTT spacer sequence GTCN PAM
cacucugucgcucaggcugg

SEQ ID NO: 24676 - RNA, 20 nt, Artificial Sequence
  HTT spacer sequence GTCN PAM
caaaaaauaaaaaugaaaua

SEQ ID NO: 24677 - RNA, 20 nt, Artificial Sequence
  HTT spacer sequence GTCN PAM
cagcacuuugggaaccugag

SEQ ID NO: 24678 - RNA, 20 nt, Artificial Sequence
  HTT spacer sequence GTCN PAM
caagcauccaccugccucag

SEQ ID NO: 24679 - RNA, 20 nt, Artificial Sequence
  HTT spacer sequence GTCN PAM
caaacuccuggucucaagca

SEQ ID NO: 24680 - RNA, 20 nt, Artificial Sequence
  HTT spacer sequence GTCN PAM
guacagaaauuagcugggug

SEQ ID NO: 24681 - RNA, 20 nt, Artificial Sequence
  HTT spacer sequence GTCN PAM
cagcuacuugggagauugag

SEQ ID NO: 24682 - RNA, 20 nt, Artificial Sequence
  HTT spacer sequence GTCN PAM
cccaggcugaagggcagugg

SEQ ID NO: 24683 - RNA, 20 nt, Artificial Sequence
  HTT spacer sequence GTCN PAM
cacuuggucgcccaggcuga

SEQ ID NO: 24684 - RNA, 20 nt, Artificial Sequence
  HTT spacer sequence GTCN PAM
caaaagaaaaacaaaaaaac

SEQ ID NO: 24685 - RNA, 20 nt, Artificial Sequence
  HTT spacer sequence GTCN PAM
auaauagugguuuguuuuuu

SEQ ID NO: 24686 - RNA, 20 nt, Artificial Sequence
  HTT spacer sequence GTCN PAM
augaucccucugcugugcug

SEQ ID NO: 24687 - RNA, 20 nt, Artificial Sequence
  HTT spacer sequence GTCN PAM
aauaccaggucuugggcccu

SEQ ID NO: 24688 - RNA, 20 nt, Artificial Sequence
  HTT spacer sequence GTCN PAM
ugggcccuuauuuccaucac

SEQ ID NO: 24689 - RNA, 20 nt, Artificial Sequence
  HTT spacer sequence GTCN PAM
accaaacagcauuuccuucu

SEQ ID NO: 24690 - RNA, 20 nt, Artificial Sequence
  HTT spacer sequence GTCN PAM
agugggcuucaauuauaaag

SEQ ID NO: 24691 - RNA, 20 nt, Artificial Sequence
  HTT spacer sequence GTCN PAM
ccaagaggguugcauagaaa

SEQ ID NO: 24692 - RNA, 20 nt, Artificial Sequence
  HTT spacer sequence GTCN PAM
cauacuagucaccaagaggg

SEQ ID NO: 24693 - RNA, 20 nt, Artificial Sequence
  HTT spacer sequence GTCN PAM
ggggccagcugcuacugauc

SEQ ID NO: 24694 - RNA, 20 nt, Artificial Sequence
  HTT spacer sequence GTCN PAM
cagcucagaugucauuucaa

SEQ ID NO: 24695 - RNA, 20 nt, Artificial Sequence
  HTT spacer sequence GTCN PAM
uuucaaaagucugcucugcc

SEQ ID NO: 24696 - RNA, 20 nt, Artificial Sequence
  HTT spacer sequence GTCN PAM
gcucugcccucuccaaauug

SEQ ID NO: 24697 - RNA, 20 nt, Artificial Sequence
  HTT spacer sequence GTCN PAM
accuugcccuguuuauguuu

SEQ ID NO: 24698 - RNA, 20 nt, Artificial Sequence
  HTT spacer sequence GTCN PAM
acugcaauuuggagagggca

SEQ ID NO: 24699 - RNA, 20 nt, Artificial Sequence
  HTT spacer sequence GTCN PAM
gaaauugucacguacagucu

SEQ ID NO: 24700 - RNA, 20 nt, Artificial Sequence
  HTT spacer sequence GTCN PAM
cguacagucuaucugugugc

SEQ ID NO: 24701 - RNA, 20 nt, Artificial Sequence
  HTT spacer sequence GTCN PAM
aucugugugcuuguuuauuu

SEQ ID NO: 24702 - RNA, 20 nt, Artificial Sequence
  HTT spacer sequence GTCN PAM
cuugcggaagggugggauag

SEQ ID NO: 24703 - RNA, 20 nt, Artificial Sequence
  HTT spacer sequence GTCN PAM
uggggcacacaucccauaag

SEQ ID NO: 24704 - RNA, 20 nt, Artificial Sequence
  HTT spacer sequence GTCN PAM
uacugucuuaugcucuguug

SEQ ID NO: 24705 - RNA, 20 nt, Artificial Sequence
  HTT spacer sequence GTCN PAM
uaugcucuguugcagcccag

SEQ ID NO: 24706 - RNA, 20 nt, Artificial Sequence
  HTT spacer sequence GTCN PAM
gcacauaguacuugcuuaaa

SEQ ID NO: 24707 - RNA, 20 nt, Artificial Sequence
  HTT spacer sequence GTCN PAM
gcaauaaugaaauugguacc

SEQ ID NO: 24708 - RNA, 20 nt, Artificial Sequence
  HTT spacer sequence GTCN PAM
guuacaugaguuaaaaauau

SEQ ID NO: 24709 - RNA, 20 nt, Artificial Sequence
  HTT spacer sequence GTCN PAM
aaacaguuguaucuuaacgg

SEQ ID NO: 24710 - RNA, 20 nt, Artificial Sequence
  HTT spacer sequence GTCN PAM
ugcuuuuguuucucaauccg

SEQ ID NO: 24711 - RNA, 20 nt, Artificial Sequence
  HTT spacer sequence GTCN PAM
augggauaucagcaucagca

SEQ ID NO: 24712 - RNA, 20 nt, Artificial Sequence
  HTT spacer sequence GTCN PAM
cugggaauguggucuaaacc

SEQ ID NO: 24713 - RNA, 20 nt, Artificial Sequence
  HTT spacer sequence GTCN PAM
aaacccucacuauuaauaug

SEQ ID NO: 24714 - RNA, 20 nt, Artificial Sequence
  HTT spacer sequence GTCN PAM
ggcauaguggcucauaccuu

SEQ ID NO: 24715 - RNA, 20 nt, Artificial Sequence
  HTT spacer sequence GTCN PAM
agcaauccaccugccuuggc

SEQ ID NO: 24716 - RNA, 20 nt, Artificial Sequence
  HTT spacer sequence GTCN PAM
gggucaagcaauccaccugc

SEQ ID NO: 24717 - RNA, 20 nt, Artificial Sequence
  HTT spacer sequence GTCN PAM
cagccacucgagaggcugag

SEQ ID NO: 24718 - RNA, 20 nt, Artificial Sequence
  HTT spacer sequence GTCN PAM
uguugagccaagaucgcacc

SEQ ID NO: 24719 - RNA, 20 nt, Artificial Sequence
  HTT spacer sequence GTCN PAM
cacucuguugcccaggcugg

SEQ ID NO: 24720 - RNA, 20 nt, Artificial Sequence
  HTT spacer sequence GTCN PAM
caaaaaaaccaaaauccaga

SEQ ID NO: 24721 - RNA, 20 nt, Artificial Sequence
  HTT spacer sequence GTCN PAM
cuuuggcugcuaugugcaga

SEQ ID NO: 24722 - RNA, 20 nt, Artificial Sequence
  HTT spacer sequence GTCN PAM
ugucauucccuuauuuaaac

SEQ ID NO: 24723 - RNA, 20 nt, Artificial Sequence
  HTT spacer sequence GTCN PAM
uucccuuauuuaaacucuug

SEQ ID NO: 24724 - RNA, 20 nt, Artificial Sequence
  HTT spacer sequence GTCN PAM
ggaaucucuaucuaaacggc

SEQ ID NO: 24725 - RNA, 20 nt, Artificial Sequence
  HTT spacer sequence GTCN PAM
auggcucugucaccucagac

SEQ ID NO: 24726 - RNA, 20 nt, Artificial Sequence
  HTT spacer sequence GTCN PAM
ccucagacacccugcauuga

SEQ ID NO: 24727 - RNA, 20 nt, Artificial Sequence
  HTT spacer sequence GTCN PAM
gaggugacagagccauugac

SEQ ID NO: 24728 - RNA, 20 nt, Artificial Sequence
  HTT spacer sequence GTCN PAM
augcagggugucugagguga

SEQ ID NO: 24729 - RNA, 20 nt, Artificial Sequence
  HTT spacer sequence GTCN PAM
gauuagagucagguuuuucu

SEQ ID NO: 24730 - RNA, 20 nt, Artificial Sequence
  HTT spacer sequence GTCN PAM
gguuuuucuuccuccugaug

SEQ ID NO: 24731 - RNA, 20 nt, Artificial Sequence
  HTT spacer sequence GTCN PAM
cuuccuuagggagguuuccc

SEQ ID NO: 24732 - RNA, 20 nt, Artificial Sequence
  HTT spacer sequence GTCN PAM
ggcaacaagcacggccucag

SEQ ID NO: 24733 - RNA, 20 nt, Artificial Sequence
  HTT spacer sequence GTCN PAM
cucuguguguugggugaauu

SEQ ID NO: 24734 - RNA, 20 nt, Artificial Sequence
  HTT spacer sequence GTCN PAM
cagaucacaggaauucaccc

SEQ ID NO: 24735 - RNA, 20 nt, Artificial Sequence
  HTT spacer sequence GTCN PAM
uacacauucggcuuuucuuc

SEQ ID NO: 24736 - RNA, 20 nt, Artificial Sequence
  HTT spacer sequence GTCN PAM
cccaacacuugagcuucauc

SEQ ID NO: 24737 - RNA, 20 nt, Artificial Sequence
  HTT spacer sequence GTCN PAM
cuaaugggauggggaaaacu

SEQ ID NO: 24738 - RNA, 20 nt, Artificial Sequence
  HTT spacer sequence GTCN PAM
uucuuccagcucuccuucag

SEQ ID NO: 24739 - RNA, 20 nt, Artificial Sequence
  HTT spacer sequence GTCN PAM
ggcacggcagaagguucacc

SEQ ID NO: 24740 - RNA, 20 nt, Artificial Sequence
  HTT spacer sequence GTCN PAM
cuugcuuguucgagucaggc

SEQ ID NO: 24741 - RNA, 20 nt, Artificial Sequence
  HTT spacer sequence GTCN PAM
aggagaccuuggcugcagcu

SEQ ID NO: 24742 - RNA, 20 nt, Artificial Sequence
  HTT spacer sequence GTCN PAM
ccuggacugauucuucgggu

SEQ ID NO: 24743 - RNA, 20 nt, Artificial Sequence
  HTT spacer sequence GTCN PAM
uuugcaaaauugccaaaaga

SEQ ID NO: 24744 - RNA, 20 nt, Artificial Sequence
  HTT spacer sequence GTCN PAM
caaacaugcgagugaugcug

SEQ ID NO: 24745 - RNA, 20 nt, Artificial Sequence
  HTT spacer sequence GTCN PAM
guggagggugagggcuucug

SEQ ID NO: 24746 - RNA, 20 nt, Artificial Sequence
  HTT spacer sequence GTCN PAM
ugugggagugcuucuugggg

SEQ ID NO: 24747 - RNA, 20 nt, Artificial Sequence
  HTT spacer sequence GTCN PAM
uaauuuagacuaccaucauu

SEQ ID NO: 24748 - RNA, 20 nt, Artificial Sequence
  HTT spacer sequence GTCN PAM
aaauuacgacauacaacaua

SEQ ID NO: 24749 - RNA, 20 nt, Artificial Sequence
  HTT spacer sequence GTCN PAM
uuaggugccucaaaaauaac

SEQ ID NO: 24750 - RNA, 20 nt, Artificial Sequence
  HTT spacer sequence GTCN PAM
cucuaguacgccgaaaacaa

SEQ ID NO: 24751 - RNA, 20 nt, Artificial Sequence
  HTT spacer sequence GTCN PAM
ucuucccgcagcuagguuaa

SEQ ID NO: 24752 - RNA, 20 nt, Artificial Sequence
  HTT spacer sequence GTCN PAM
uggcacagucaucuucccgc

SEQ ID NO: 24753 - RNA, 20 nt, Artificial Sequence
  HTT spacer sequence GTCN PAM
gugagcuuucuccuaccugc

SEQ ID NO: 24754 - RNA, 20 nt, Artificial Sequence
  HTT spacer sequence GTCN PAM
gaacguccugcagcuaucag

SEQ ID NO: 24755 - RNA, 20 nt, Artificial Sequence
  HTT spacer sequence GTCN PAM
ugcagcuaucagagccuguu

SEQ ID NO: 24756 - RNA, 20 nt, Artificial Sequence
  HTT spacer sequence GTCN PAM
agaaauagugacccugucac

SEQ ID NO: 24757 - RNA, 20 nt, Artificial Sequence
  HTT spacer sequence GTCN PAM
cuauuucuggacauuauaaa

SEQ ID NO: 24758 - RNA, 20 nt, Artificial Sequence
  HTT spacer sequence GTCN PAM
caugcucuacagauuacagg

SEQ ID NO: 24759 - RNA, 20 nt, Artificial Sequence
  HTT spacer sequence GTCN PAM
guccuggguuugagcccaag

SEQ ID NO: 24760 - RNA, 20 nt, Artificial Sequence
  HTT spacer sequence GTCN PAM
uggguuugagcccaagugac

SEQ ID NO: 24761 - RNA, 20 nt, Artificial Sequence
  HTT spacer sequence GTCN PAM
cuugggcucaaacccaggac

SEQ ID NO: 24762 - RNA, 20 nt, Artificial Sequence
  HTT spacer sequence GTCN PAM
aucugauuccacucuaccca

SEQ ID NO: 24763 - RNA, 20 nt, Artificial Sequence
  HTT spacer sequence GTCN PAM
ucuuuacuaguuauuuuccu

SEQ ID NO: 24764 - RNA, 20 nt, Artificial Sequence
  HTT spacer sequence GTCN PAM
cauuaaggcuuauuuuucag

SEQ ID NO: 24765 - RNA, 20 nt, Artificial Sequence
  HTT spacer sequence GTCN PAM
cccacgggaagggcuuagau

SEQ ID NO: 24766 - RNA, 20 nt, Artificial Sequence
  HTT spacer sequence GTCN PAM
ugggguuuuggaaugacgaa

SEQ ID NO: 24767 - RNA, 20 nt, Artificial Sequence
  HTT spacer sequence GTCN PAM
uuccaaaaccccaugacuag

SEQ ID NO: 24768 - RNA, 20 nt, Artificial Sequence
  HTT spacer sequence GTCN PAM
gaggcugugagagcuccaca

SEQ ID NO: 24769 - RNA, 20 nt, Artificial Sequence
  HTT spacer sequence GTCN PAM
guugaaggcaguccccucug

SEQ ID NO: 24770 - RNA, 20 nt, Artificial Sequence
  HTT spacer sequence GTCN PAM
ccucugugauaucucuggcu

SEQ ID NO: 24771 - RNA, 20 nt, Artificial Sequence
  HTT spacer sequence GTCN PAM
gagcucagaugauagauggu

SEQ ID NO: 24772 - RNA, 20 nt, Artificial Sequence
  HTT spacer sequence GTCN PAM
caaacuccuggccucaagca

SEQ ID NO: 24773 - RNA, 20 nt, Artificial Sequence
  HTT spacer sequence GTCN PAM
cacuaucuugcccaggcugg

SEQ ID NO: 24774 - RNA, 20 nt, Artificial Sequence
  HTT spacer sequence GTCN PAM
agcuaauuuuuuuucaguuu

SEQ ID NO: 24775 - RNA, 20 nt, Artificial Sequence
  HTT spacer sequence GTCN PAM
uagcuacucaggaggcugag

SEQ ID NO: 24776 - RNA, 20 nt, Artificial Sequence
  HTT spacer sequence GTCN PAM
cagccuccugaguagcuagg

SEQ ID NO: 24777 - RNA, 20 nt, Artificial Sequence
  HTT spacer sequence GTCN PAM
cacaggcaaacauaacucuu

SEQ ID NO: 24778 - RNA, 20 nt, Artificial Sequence
  HTT spacer sequence GTCN PAM
uugcacuccagccuuggcaa

SEQ ID NO: 24779 - RNA, 20 nt, Artificial Sequence
  HTT spacer sequence GTCN PAM
cccggguucaagcgauucuc

SEQ ID NO: 24780 - RNA, 20 nt, Artificial Sequence
  HTT spacer sequence GTCN PAM
ggcuggucucgaacuccuga

SEQ ID NO: 24781 - RNA, 20 nt, Artificial Sequence
  HTT spacer sequence GTCN PAM
cgaacuccugaccucaggug

SEQ ID NO: 24782 - RNA, 20 nt, Artificial Sequence
  HTT spacer sequence GTCN PAM
ggaguucgagaccagccuga

SEQ ID NO: 24783 - RNA, 20 nt, Artificial Sequence
  HTT spacer sequence GTCN PAM
aaaauugaaaaaaaaaauag

SEQ ID NO: 24784 - RNA, 20 nt, Artificial Sequence
  HTT spacer sequence GTCN PAM
ugguugcuuacguauuauau

SEQ ID NO: 24785 - RNA, 20 nt, Artificial Sequence
  HTT spacer sequence GTCN PAM
ucucuccaguuucaacccag

SEQ ID NO: 24786 - RNA, 20 nt, Artificial Sequence
  HTT spacer sequence GTCN PAM
uccuccuccuccccaggucc

SEQ ID NO: 24787 - RNA, 20 nt, Artificial Sequence
  HTT spacer sequence GTCN PAM
ccaacuucaucuguccuccu

SEQ ID NO: 24788 - RNA, 20 nt, Artificial Sequence
  HTT spacer sequence GTCN PAM
ccuagaacuucgauaggggc

SEQ ID NO: 24789 - RNA, 20 nt, Artificial Sequence
  HTT spacer sequence GTCN PAM
ccagcacugggucaccuaga

SEQ ID NO: 24790 - RNA, 20 nt, Artificial Sequence
  HTT spacer sequence GTCN PAM
aaucauggaggugggggcua

SEQ ID NO: 24791 - RNA, 20 nt, Artificial Sequence
  HTT spacer sequence GTCN PAM
ccuccaccuccaagaugccu

SEQ ID NO: 24792 - RNA, 20 nt, Artificial Sequence
  HTT spacer sequence GTCN PAM
uguucaaucuucuuccagau

SEQ ID NO: 24793 - RNA, 20 nt, Artificial Sequence
  HTT spacer sequence GTCN PAM
ggaucuggaagaagauugaa

SEQ ID NO: 24794 - RNA, 20 nt, Artificial Sequence
  HTT spacer sequence GTCN PAM
gaggaaagcugaaccuagaa

SEQ ID NO: 24795 - RNA, 20 nt, Artificial Sequence
  HTT spacer sequence GTCN PAM
uuguacaacuuuuuguuuuc

SEQ ID NO: 24796 - RNA, 20 nt, Artificial Sequence
  HTT spacer sequence GTCN PAM
ucucacaccuuccaacuucu

SEQ ID NO: 24797 - RNA, 20 nt, Artificial Sequence
  HTT spacer sequence GTCN PAM
ugaaaaauuguacuaaacac

SEQ ID NO: 24798 - RNA, 20 nt, Artificial Sequence
  HTT spacer sequence GTCN PAM
uccaacuugaguuauccagc

SEQ ID NO: 24799 - RNA, 20 nt, Artificial Sequence
  HTT spacer sequence GTCN PAM
gggcagguugaucuucaggu

SEQ ID NO: 24800 - RNA, 20 nt, Artificial Sequence
  HTT spacer sequence GTCN PAM
guaguacacuuguauccuag

SEQ ID NO: 24801 - RNA, 20 nt, Artificial Sequence
  HTT spacer sequence GTCN PAM
uaggauacaaguguacuaca

SEQ ID NO: 24802 - RNA, 20 nt, Artificial Sequence
  HTT spacer sequence GTCN PAM
aguagcuuccugagagaaga

SEQ ID NO: 24803 - RNA, 20 nt, Artificial Sequence
  HTT spacer sequence GTCN PAM
uugcccuguugucuuaaaau

SEQ ID NO: 24804 - RNA, 20 nt, Artificial Sequence
  HTT spacer sequence GTCN PAM
uaaaaucuccaacgugaccc

SEQ ID NO: 24805 - RNA, 20 nt, Artificial Sequence
  HTT spacer sequence GTCN PAM
cguuggagauuuuaagacaa

SEQ ID NO: 24806 - RNA, 20 nt, Artificial Sequence
  HTT spacer sequence GTCN PAM
uccuagauugacucacaucu

SEQ ID NO: 24807 - RNA, 20 nt, Artificial Sequence
  HTT spacer sequence GTCN PAM
aucuaggaggaccaacaucc

SEQ ID NO: 24808 - RNA, 20 nt, Artificial Sequence
  HTT spacer sequence GTCN PAM
cuugauggggucuugcccug

SEQ ID NO: 24809 - RNA, 20 nt, Artificial Sequence
  HTT spacer sequence GTCN PAM
ugcccuguugcccagguugu

SEQ ID NO: 24810 - RNA, 20 nt, Artificial Sequence
  HTT spacer sequence GTCN PAM
caacuacuugggagggugag

SEQ ID NO: 24811 - RNA, 20 nt, Artificial Sequence
  HTT spacer sequence GTCN PAM
agcuauuuucuuuacuuuuu

SEQ ID NO: 24812 - RNA, 20 nt, Artificial Sequence
  HTT spacer sequence GTCN PAM
uacucugucgcccaggcuag

SEQ ID NO: 24813 - RNA, 20 nt, Artificial Sequence
  HTT spacer sequence GTCN PAM
cccaggcuagagugcggugg

SEQ ID NO: 24814 - RNA, 20 nt, Artificial Sequence
  HTT spacer sequence GTCN PAM
cgaacgccugaccucaggug

SEQ ID NO: 24815 - RNA, 20 nt, Artificial Sequence
  HTT spacer sequence GTCN PAM
ggcguucgagaccagccugg

SEQ ID NO: 24816 - RNA, 20 nt, Artificial Sequence
  HTT spacer sequence GTCN PAM
uuuccucuugagucagcuag

SEQ ID NO: 24817 - RNA, 20 nt, Artificial Sequence
  HTT spacer sequence GTCN PAM
gcuaguaucccuggaaggaa

SEQ ID NO: 24818 - RNA, 20 nt, Artificial Sequence
  HTT spacer sequence GTCN PAM
ccgguugcaggauaaacaua

SEQ ID NO: 24819 - RNA, 20 nt, Artificial Sequence
  HTT spacer sequence GTCN PAM
ccucccuuccaguccccggu

SEQ ID NO: 24820 - RNA, 20 nt, Artificial Sequence
  HTT spacer sequence GTCN PAM
guccccucccuuccaguccc

SEQ ID NO: 24821 - RNA, 20 nt, Artificial Sequence
  HTT spacer sequence GTCN PAM
gggugcccucuuacuuuuug

SEQ ID NO: 24822 - RNA, 20 nt, Artificial Sequence
  HTT spacer sequence GTCN PAM
guccucagccuauguaaaca

SEQ ID NO: 24823 - RNA, 20 nt, Artificial Sequence
  HTT spacer sequence GTCN PAM
ucagccuauguaaacaccuc

SEQ ID NO: 24824 - RNA, 20 nt, Artificial Sequence
  HTT spacer sequence GTCN PAM
ucccuccaauccaaggcagc

SEQ ID NO: 24825 - RNA, 20 nt, Artificial Sequence
  HTT spacer sequence GTCN PAM
cauggcuccuugggcaaauu

SEQ ID NO: 24826 - RNA, 20 nt, Artificial Sequence
  HTT spacer sequence GTCN PAM
guggcuucaauaagcuugcu

SEQ ID NO: 24827 - RNA, 20 nt, Artificial Sequence
  HTT spacer sequence GTCN PAM
ccagcaaagcuugcauuuga

SEQ ID NO: 24828 - RNA, 20 nt, Artificial Sequence
  HTT spacer sequence GTCN PAM
guuauguagcucuuguuacu

SEQ ID NO: 24829 - RNA, 20 nt, Artificial Sequence
  HTT spacer sequence GTCN PAM
acaaaacuucggaagcuaaa

SEQ ID NO: 24830 - RNA, 20 nt, Artificial Sequence
  HTT spacer sequence GTCN PAM
gcuaaugucccuguucuguu

SEQ ID NO: 24831 - RNA, 20 nt, Artificial Sequence
  HTT spacer sequence GTCN PAM
cuguucuguucuuucuguuc

SEQ ID NO: 24832 - RNA, 20 nt, Artificial Sequence
  HTT spacer sequence GTCN PAM
ggaaaaggaaaaacaaggga

SEQ ID NO: 24833 - RNA, 20 nt, Artificial Sequence
  HTT spacer sequence GTCN PAM
uguaugguauguacauuucc

SEQ ID NO: 24834 - RNA, 20 nt, Artificial Sequence
  HTT spacer sequence GTCN PAM
agacagaauauuaccaagca

SEQ ID NO: 24835 - RNA, 20 nt, Artificial Sequence
  HTT spacer sequence GTCN PAM
ugaccuggguggcgguuaca

SEQ ID NO: 24836 - RNA, 20 nt, Artificial Sequence
  HTT spacer sequence GTCN PAM
cugcuccugccuuccucccc

SEQ ID NO: 24837 - RNA, 20 nt, Artificial Sequence
  HTT spacer sequence GTCN PAM
ugacugcuggcuucuaauuc

SEQ ID NO: 24838 - RNA, 20 nt, Artificial Sequence
  HTT spacer sequence GTCN PAM
ugaccuuggggaggaaggca

SEQ ID NO: 24839 - RNA, 20 nt, Artificial Sequence
  HTT spacer sequence GTCN PAM
guuuuuaaauucuguguaca

SEQ ID NO: 24840 - RNA, 20 nt, Artificial Sequence
  HTT spacer sequence GTCN PAM
auguacacagaauuuaaaaa

SEQ ID NO: 24841 - RNA, 20 nt, Artificial Sequence
  HTT spacer sequence GTCN PAM
gguuuauuuuggucgacauu

SEQ ID NO: 24842 - RNA, 20 nt, Artificial Sequence
  HTT spacer sequence GTCN PAM
acauuaaguucaugagaguc

SEQ ID NO: 24843 - RNA, 20 nt, Artificial Sequence
  HTT spacer sequence GTCN PAM
accaaaauaaaccagacaaa

SEQ ID NO: 24844 - RNA, 20 nt, Artificial Sequence
  HTT spacer sequence GTCN PAM
ucuauauuaucguguguauu

SEQ ID NO: 24845 - RNA, 20 nt, Artificial Sequence
  HTT spacer sequence GTCN PAM
caguagcacugcucgcaaua

SEQ ID NO: 24846 - RNA, 20 nt, Artificial Sequence
  HTT spacer sequence GTCN PAM
uuuggaguacaugugcaggu

SEQ ID NO: 24847 - RNA, 20 nt, Artificial Sequence
  HTT spacer sequence GTCN PAM
ucgcuagcacuuggaauugc

SEQ ID NO: 24848 - RNA, 20 nt, Artificial Sequence
  HTT spacer sequence GTCN PAM
aaucucuacaaucccaagaa

SEQ ID NO: 24849 - RNA, 20 nt, Artificial Sequence
  HTT spacer sequence GTCN PAM
gagagcuccaaggggccucc

SEQ ID NO: 24850 - RNA, 20 nt, Artificial Sequence
  HTT spacer sequence GTCN PAM
gcacacggugagcuuaaaua

SEQ ID NO: 24851 - RNA, 20 nt, Artificial Sequence
  HTT spacer sequence GTCN PAM
auuuggacucauacaaugau

SEQ ID NO: 24852 - RNA, 20 nt, Artificial Sequence
  HTT spacer sequence GTCN PAM
aaauagacaagcacaaugag

SEQ ID NO: 24853 - RNA, 20 nt, Artificial Sequence
  HTT spacer sequence GTCN PAM
caaagaaaaaaaaaaaauca

SEQ ID NO: 24854 - RNA, 20 nt, Artificial Sequence
  HTT spacer sequence GTCN PAM
ugcucuguugccuaggcugg

SEQ ID NO: 24855 - RNA, 20 nt, Artificial Sequence
  HTT spacer sequence GTCN PAM
cagcuacuugagaagcugag

SEQ ID NO: 24856 - RNA, 20 nt, Artificial Sequence
  HTT spacer sequence GTCN PAM
cuacuaaaaauacaaacauu

SEQ ID NO: 24857 - RNA, 20 nt, Artificial Sequence
  HTT spacer sequence GTCN PAM
caaacuccugaccucaagug

SEQ ID NO: 24858 - RNA, 20 nt, Artificial Sequence
  HTT spacer sequence GTCN PAM
ggaguuugagaccaaccugg

SEQ ID NO: 24859 - RNA, 20 nt, Artificial Sequence
  HTT spacer sequence GTCN PAM
gagaugauucuacuuuguuc

SEQ ID NO: 24860 - RNA, 20 nt, Artificial Sequence
  HTT spacer sequence GTCN PAM
uguggcugggggguggggua

SEQ ID NO: 24861 - RNA, 20 nt, Artificial Sequence
  HTT spacer sequence GTCN PAM
uguggcuccuugucagggag

SEQ ID NO: 24862 - RNA, 20 nt, Artificial Sequence
  HTT spacer sequence GTCN PAM
gggaguccuguggcuggcaa

SEQ ID NO: 24863 - RNA, 20 nt, Artificial Sequence
  HTT spacer sequence GTCN PAM
uguggcuggcaaggagagaa

SEQ ID NO: 24864 - RNA, 20 nt, Artificial Sequence
  HTT spacer sequence GTCN PAM
uguggcuggguugggaggga

SEQ ID NO: 24865 - RNA, 20 nt, Artificial Sequence
  HTT spacer sequence GTCN PAM
uguggcuggggucucauccu

SEQ ID NO: 24866 - RNA, 20 nt, Artificial Sequence
  HTT spacer sequence GTCN PAM
cauccugugccuaacagugu

SEQ ID NO: 24867 - RNA, 20 nt, Artificial Sequence
  HTT spacer sequence GTCN PAM
agaggugccgagaccagcuc

SEQ ID NO: 24868 - RNA, 20 nt, Artificial Sequence
  HTT spacer sequence GTCN PAM
cggcaccucuggacacuguu

SEQ ID NO: 24869 - RNA, 20 nt, Artificial Sequence
  HTT spacer sequence GTCN PAM
gggagacccuaacccagcag

SEQ ID NO: 24870 - RNA, 20 nt, Artificial Sequence
  HTT spacer sequence GTCN PAM
ccccgacugagcuggucucg

SEQ ID NO: 24871 - RNA, 20 nt, Artificial Sequence
  HTT spacer sequence GTCN PAM
uuaauuccucuagcgcugcu

SEQ ID NO: 24872 - RNA, 20 nt, Artificial Sequence
  HTT spacer sequence GTCN PAM
cacagccuuuagagcugaga

SEQ ID NO: 24873 - RNA, 20 nt, Artificial Sequence
  HTT spacer sequence GTCN PAM
uuagcauuguuucuauagau

SEQ ID NO: 24874 - RNA, 20 nt, Artificial Sequence
  HTT spacer sequence GTCN PAM
uuaaggcacagaucgcucau

SEQ ID NO: 24875 - RNA, 20 nt, Artificial Sequence
  HTT spacer sequence GTCN PAM
acccacaaccuuccagugug

SEQ ID NO: 24876 - RNA, 20 nt, Artificial Sequence
  HTT spacer sequence GTCN PAM
cguguaaauucccugggagg

SEQ ID NO: 24877 - RNA, 20 nt, Artificial Sequence
  HTT spacer sequence GTCN PAM
guuucucagaggcuuaucgc

SEQ ID NO: 24878 - RNA, 20 nt, Artificial Sequence
  HTT spacer sequence GTCN PAM
gagcuacgccugggcaaaua

SEQ ID NO: 24879 - RNA, 20 nt, Artificial Sequence
  HTT spacer sequence GTCN PAM
ccgacucauagugcuugcuc

SEQ ID NO: 24880 - RNA, 20 nt, Artificial Sequence
  HTT spacer sequence GTCN PAM
gggacucugucagagcuacg

SEQ ID NO: 24881 - RNA, 20 nt, Artificial Sequence
  HTT spacer sequence GTCN PAM
uggcucagagcauaguuuug

SEQ ID NO: 24882 - RNA, 20 nt, Artificial Sequence
  HTT spacer sequence GTCN PAM
ccaagauaaugcgacuagcu

SEQ ID NO: 24883 - RNA, 20 nt, Artificial Sequence
  HTT spacer sequence GTCN PAM
cauuaucuuggugacuaugu

SEQ ID NO: 24884 - RNA, 20 nt, Artificial Sequence
  HTT spacer sequence GTCN PAM
ccccuuuucaauuuuaggau

SEQ ID NO: 24885 - RNA, 20 nt, Artificial Sequence
  HTT spacer sequence GTCN PAM
uagaggcccaugagaaagua

SEQ ID NO: 24886 - RNA, 20 nt, Artificial Sequence
  HTT spacer sequence GTCN PAM
uguccaguuaaauugcagau

SEQ ID NO: 24887 - RNA, 20 nt, Artificial Sequence
  HTT spacer sequence GTCN PAM
aguuaaauugcagauauuuc

SEQ ID NO: 24888 - RNA, 20 nt, Artificial Sequence
  HTT spacer sequence GTCN PAM
ugagaacuucgugacauuag

SEQ ID NO: 24889 - RNA, 20 nt, Artificial Sequence
  HTT spacer sequence GTCN PAM
cgaaguucucaggacuggaa

SEQ ID NO: 24890 - RNA, 20 nt, Artificial Sequence
  HTT spacer sequence GTCN PAM
ugcuaaugucacgaaguucu

SEQ ID NO: 24891 - RNA, 20 nt, Artificial Sequence
  HTT spacer sequence GTCN PAM
uuuguugauuuuuuuuuaac

SEQ ID NO: 24892 - RNA, 20 nt, Artificial Sequence
  HTT spacer sequence GTCN PAM
ccaaauacugugggcagagu

SEQ ID NO: 24893 - RNA, 20 nt, Artificial Sequence
  HTT spacer sequence GTCN PAM
ucuccgcaaugguggaggcc

SEQ ID NO: 24894 - RNA, 20 nt, Artificial Sequence
  HTT spacer sequence GTCN PAM
ccugagugaagguuauaaag

SEQ ID NO: 24895 - RNA, 20 nt, Artificial Sequence
  HTT spacer sequence GTCN PAM
auuugcuucuuuauaaccuu

SEQ ID NO: 24896 - RNA, 20 nt, Artificial Sequence
  HTT spacer sequence GTCN PAM
guaaacugcucuugaguguc

SEQ ID NO: 24897 - RNA, 20 nt, Artificial Sequence
  HTT spacer sequence GTCN PAM
caaauuugggguacuucagu

SEQ ID NO: 24898 - RNA, 20 nt, Artificial Sequence
  HTT spacer sequence GTCN PAM
aaguagauaaaagaugaagc

SEQ ID NO: 24899 - RNA, 20 nt, Artificial Sequence
  HTT spacer sequence GTCN PAM
agcucccccaccauucggcg

SEQ ID NO: 24900 - RNA, 20 nt, Artificial Sequence
  HTT spacer sequence GTCN PAM
gccgaauggugggggagcuu

SEQ ID NO: 24901 - RNA, 20 nt, Artificial Sequence
  HTT spacer sequence GTCN PAM
uucuugagugcuggcagaug

SEQ ID NO: 24902 - RNA, 20 nt, Artificial Sequence
  HTT spacer sequence GTCN PAM
ccagcauguacucaagauag

SEQ ID NO: 24903 - RNA, 20 nt, Artificial Sequence
  HTT spacer sequence GTCN PAM
aucuugaguacaugcuggag

SEQ ID NO: 24904 - RNA, 20 nt, Artificial Sequence
  HTT spacer sequence GTCN PAM
agaagcugagggaucaucug

SEQ ID NO: 24905 - RNA, 20 nt, Artificial Sequence
  HTT spacer sequence GTCN PAM
cugugacccugcagaugcag

SEQ ID NO: 24906 - RNA, 20 nt, Artificial Sequence
  HTT spacer sequence GTCN PAM
cagagacccaugcgggcuca

SEQ ID NO: 24907 - RNA, 20 nt, Artificial Sequence
  HTT spacer sequence GTCN PAM
cugggcacggcugcaucugc

SEQ ID NO: 24908 - RNA, 20 nt, Artificial Sequence
  HTT spacer sequence GTCN PAM
gccacccagggccuggcccu

SEQ ID NO: 24909 - RNA, 20 nt, Artificial Sequence
  HTT spacer sequence GTCN PAM
gugucggccaugacuauggu

SEQ ID NO: 24910 - RNA, 20 nt, Artificial Sequence
  HTT spacer sequence GTCN PAM
gccaugacuauggugagucu

SEQ ID NO: 24911 - RNA, 20 nt, Artificial Sequence
  HTT spacer sequence GTCN PAM
uggccgacacagacagaggg

SEQ ID NO: 24912 - RNA, 20 nt, Artificial Sequence
  HTT spacer sequence GTCN PAM
uguaggcuugagacugugcc

SEQ ID NO: 24913 - RNA, 20 nt, Artificial Sequence
  HTT spacer sequence GTCN PAM
caagccuacaagacucacca

SEQ ID NO: 24914 - RNA, 20 nt, Artificial Sequence
  HTT spacer sequence GTCN PAM
guugacaguuucuccuguug

SEQ ID NO: 24915 - RNA, 20 nt, Artificial Sequence
  HTT spacer sequence GTCN PAM
acugaccuacagagaacccg

SEQ ID NO: 24916 - RNA, 20 nt, Artificial Sequence
  HTT spacer sequence GTCN PAM
acaugcucgcuucagcacuu

SEQ ID NO: 24917 - RNA, 20 nt, Artificial Sequence
  HTT spacer sequence GTCN PAM
uuauuucauaucgcacgucc

SEQ ID NO: 24918 - RNA, 20 nt, Artificial Sequence
  HTT spacer sequence GTCN PAM
uuuccagagagccucacugc

SEQ ID NO: 24919 - RNA, 20 nt, Artificial Sequence
  HTT spacer sequence GTCN PAM
gauguuaagaugucuugcuu

SEQ ID NO: 24920 - RNA, 20 nt, Artificial Sequence
  HTT spacer sequence GTCN PAM
ugcuuccacccccacaggcu

SEQ ID NO: 24921 - RNA, 20 nt, Artificial Sequence
  HTT spacer sequence GTCN PAM
aggaugaacacuccacucug

SEQ ID NO: 24922 - RNA, 20 nt, Artificial Sequence
  HTT spacer sequence GTCN PAM
aggacacaagccugaaaggc

SEQ ID NO: 24923 - RNA, 20 nt, Artificial Sequence
  HTT spacer sequence GTCN PAM
uugaccugcugcugcagcaa

SEQ ID NO: 24924 - RNA, 20 nt, Artificial Sequence
  HTT spacer sequence GTCN PAM
cuccgaagcugccuuucagg

SEQ ID NO: 24925 - RNA, 20 nt, Artificial Sequence
  HTT spacer sequence GTCN PAM
cuccuucugcagagcagcuu

SEQ ID NO: 24926 - RNA, 20 nt, Artificial Sequence
  HTT spacer sequence GTCN PAM
agguaggagcacaggguuua

SEQ ID NO: 24927 - RNA, 20 nt, Artificial Sequence
  HTT spacer sequence GTCN PAM
uucacaugcagggccuagag

SEQ ID NO: 24928 - RNA, 20 nt, Artificial Sequence
  HTT spacer sequence GTCN PAM
gucauucacaugcagggccu

SEQ ID NO: 24929 - RNA, 20 nt, Artificial Sequence
  HTT spacer sequence GTCN PAM
acaccucuaacucucgguuc

SEQ ID NO: 24930 - RNA, 20 nt, Artificial Sequence
  HTT spacer sequence GTCN PAM
gcaccuaggguuggaaacga

SEQ ID NO: 24931 - RNA, 20 nt, Artificial Sequence
  HTT spacer sequence GTCN PAM
ucccucuguaugucccuguc

SEQ ID NO: 24932 - RNA, 20 nt, Artificial Sequence
  HTT spacer sequence GTCN PAM
cugucaccgugagucaaaug

SEQ ID NO: 24933 - RNA, 20 nt, Artificial Sequence
  HTT spacer sequence GTCN PAM
ccgugagucaaaugcgggug

SEQ ID NO: 24934 - RNA, 20 nt, Artificial Sequence
  HTT spacer sequence GTCN PAM
aaugcgggugaugccuccuc

SEQ ID NO: 24935 - RNA, 20 nt, Artificial Sequence
  HTT spacer sequence GTCN PAM
cugagaggcuuagguaacac

SEQ ID NO: 24936 - RNA, 20 nt, Artificial Sequence
  HTT spacer sequence GTCN PAM
cgauauguguucauccaccc

SEQ ID NO: 24937 - RNA, 20 nt, Artificial Sequence
  HTT spacer sequence GTCN PAM
aggcacggugguauaugcuc

SEQ ID NO: 24938 - RNA, 20 nt, Artificial Sequence
  HTT spacer sequence GTCN PAM
cuaucuccuugagugagcau

SEQ ID NO: 24939 - RNA, 20 nt, Artificial Sequence
  HTT spacer sequence GTCN PAM
uuuggggugucggaacaaaa

SEQ ID NO: 24940 - RNA, 20 nt, Artificial Sequence
  HTT spacer sequence GTCN PAM
gaacaaaaugucggaacuuc

SEQ ID NO: 24941 - RNA, 20 nt, Artificial Sequence
  HTT spacer sequence GTCN PAM
gaacuucucuuuccaaugca

SEQ ID NO: 24942 - RNA, 20 nt, Artificial Sequence
  HTT spacer sequence GTCN PAM
acugccaaucacaguacauu

SEQ ID NO: 24943 - RNA, 20 nt, Artificial Sequence
  HTT spacer sequence GTCN PAM
ggguuuuuauugugcuuaau

SEQ ID NO: 24944 - RNA, 20 nt, Artificial Sequence
  HTT spacer sequence GTCN PAM
acuuuugcucagcuguuuau

SEQ ID NO: 24945 - RNA, 20 nt, Artificial Sequence
  HTT spacer sequence GTCN PAM
caugggauaugacauuuaua

SEQ ID NO: 24946 - RNA, 20 nt, Artificial Sequence
  HTT spacer sequence GTCN PAM
uaucccaugagacucugcuu

SEQ ID NO: 24947 - RNA, 20 nt, Artificial Sequence
  HTT spacer sequence GTCN PAM
ugaguugauacuuuuguaug

SEQ ID NO: 24948 - RNA, 20 nt, Artificial Sequence
  HTT spacer sequence GTCN PAM
ucaucuauagagauacugaa

SEQ ID NO: 24949 - RNA, 20 nt, Artificial Sequence
  HTT spacer sequence GTCN PAM
gaugcaguguucaugccugu

SEQ ID NO: 24950 - RNA, 20 nt, Artificial Sequence
  HTT spacer sequence GTCN PAM
caaacucccagguucaagug

SEQ ID NO: 24951 - RNA, 20 nt, Artificial Sequence
  HTT spacer sequence GTCN PAM
uaaagaaaaaaaucagccaa

SEQ ID NO: 24952 - RNA, 20 nt, Artificial Sequence
  HTT spacer sequence GTCN PAM
cagcuacuugggaggcugag

SEQ ID NO: 24953 - RNA, 20 nt, Artificial Sequence
  HTT spacer sequence GTCN PAM
caugagccuggaagaucaag

SEQ ID NO: 24954 - RNA, 20 nt, Artificial Sequence
  HTT spacer sequence GTCN PAM
caaaaaaacaaaacugcaaa

SEQ ID NO: 24955 - RNA, 20 nt, Artificial Sequence
  HTT spacer sequence GTCN PAM
caaaacagugccauuguuag

SEQ ID NO: 24956 - RNA, 20 nt, Artificial Sequence
  HTT spacer sequence GTCN PAM
aacaauggcacuguuuugug

SEQ ID NO: 24957 - RNA, 20 nt, Artificial Sequence
  HTT spacer sequence GTCN PAM
auaaggauuguaaaucucuu

SEQ ID NO: 24958 - RNA, 20 nt, Artificial Sequence
  HTT spacer sequence GTCN PAM
ucuaaguuuuccuguggucu

SEQ ID NO: 24959 - RNA, 20 nt, Artificial Sequence
  HTT spacer sequence GTCN PAM
gauauacugcuuccaucucc

SEQ ID NO: 24960 - RNA, 20 nt, Artificial Sequence
  HTT spacer sequence GTCN PAM
gauuuaguguauauuuuaua

SEQ ID NO: 24961 - RNA, 20 nt, Artificial Sequence
  HTT spacer sequence GTCN PAM
aguauuucuuauauaauauu

SEQ ID NO: 24962 - RNA, 20 nt, Artificial Sequence
  HTT spacer sequence GTCN PAM
gaugggaaaagcaaauaauu

SEQ ID NO: 24963 - RNA, 20 nt, Artificial Sequence
  HTT spacer sequence GTCN PAM
ugagccgucacuuaugggca

SEQ ID NO: 24964 - RNA, 20 nt, Artificial Sequence
  HTT spacer sequence GTCN PAM
cuuaugggcacguggaaucu

SEQ ID NO: 24965 - RNA, 20 nt, Artificial Sequence
  HTT spacer sequence GTCN PAM
gauuccacgugcccauaagu

SEQ ID NO: 24966 - RNA, 20 nt, Artificial Sequence
  HTT spacer sequence GTCN PAM
ucucccaacucugugccggg

SEQ ID NO: 24967 - RNA, 20 nt, Artificial Sequence
  HTT spacer sequence GTCN PAM
auaaagcuccugucuucucc

SEQ ID NO: 24968 - RNA, 20 nt, Artificial Sequence
  HTT spacer sequence GTCN PAM
uugcuaagucccaggaguga

SEQ ID NO: 24969 - RNA, 20 nt, Artificial Sequence
  HTT spacer sequence GTCN PAM
caggagugaaagggugagac

SEQ ID NO: 24970 - RNA, 20 nt, Artificial Sequence
  HTT spacer sequence GTCN PAM
cacccuuucacuccugggac

SEQ ID NO: 24971 - RNA, 20 nt, Artificial Sequence
  HTT spacer sequence GTCN PAM
acgcacccacacucgugugc

SEQ ID NO: 24972 - RNA, 20 nt, Artificial Sequence
  HTT spacer sequence GTCN PAM
ugaaaaggccugcaggcuuu

SEQ ID NO: 24973 - RNA, 20 nt, Artificial Sequence
  HTT spacer sequence GTCN PAM
uuccaggauuacugcaaucc

SEQ ID NO: 24974 - RNA, 20 nt, Artificial Sequence
  HTT spacer sequence GTCN PAM
cacauccauacccuuuuuuc

SEQ ID NO: 24975 - RNA, 20 nt, Artificial Sequence
  HTT spacer sequence GTCN PAM
uaagaaaaucagcaauuaag

SEQ ID NO: 24976 - RNA, 20 nt, Artificial Sequence
  HTT spacer sequence GTCN PAM
aaagaagauggaguaagaua

SEQ ID NO: 24977 - RNA, 20 nt, Artificial Sequence
  HTT spacer sequence GTCN PAM
caugguaauuuaauuaagaa

SEQ ID NO: 24978 - RNA, 20 nt, Artificial Sequence
  HTT spacer sequence GTCN PAM
gcaagauuuauaaaggaaau

SEQ ID NO: 24979 - RNA, 20 nt, Artificial Sequence
  HTT spacer sequence GTCN PAM
aauggguucucuuacucuaa

SEQ ID NO: 24980 - RNA, 20 nt, Artificial Sequence
  HTT spacer sequence GTCN PAM
caagguuaauggucaaaugg

SEQ ID NO: 24981 - RNA, 20 nt, Artificial Sequence
  HTT spacer sequence GTCN PAM
uuugaaagagaaugucccaa

SEQ ID NO: 24982 - RNA, 20 nt, Artificial Sequence
  HTT spacer sequence GTCN PAM
agguuauugugacuggacuc

SEQ ID NO: 24983 - RNA, 20 nt, Artificial Sequence
  HTT spacer sequence GTCN PAM
caauaaccuagacucagaaa

SEQ ID NO: 24984 - RNA, 20 nt, Artificial Sequence
  HTT spacer sequence GTCN PAM
agucacaauaaccuagacuc

SEQ ID NO: 24985 - RNA, 20 nt, Artificial Sequence
  HTT spacer sequence GTCN PAM
aaguauaagcugauuacgua

SEQ ID NO: 24986 - RNA, 20 nt, Artificial Sequence
  HTT spacer sequence GTCN PAM
ugcaggccaucccaagucug

SEQ ID NO: 24987 - RNA, 20 nt, Artificial Sequence
  HTT spacer sequence GTCN PAM
guggcagcuacucaacacua

SEQ ID NO: 24988 - RNA, 20 nt, Artificial Sequence
  HTT spacer sequence GTCN PAM
ggccugcaccugcuuuugua

SEQ ID NO: 24989 - RNA, 20 nt, Artificial Sequence
  HTT spacer sequence GTCN PAM
ggucuggccugcaccugcuu

SEQ ID NO: 24990 - RNA, 20 nt, Artificial Sequence
  HTT spacer sequence GTCN PAM
gcaaaccacagugcacaggu

SEQ ID NO: 24991 - RNA, 20 nt, Artificial Sequence
  HTT spacer sequence GTCN PAM
cacuuuuagcucuucugaug

SEQ ID NO: 24992 - RNA, 20 nt, Artificial Sequence
  HTT spacer sequence GTCN PAM
gauuuugaaaaaaagaaaca

SEQ ID NO: 24993 - RNA, 20 nt, Artificial Sequence
  HTT spacer sequence GTCN PAM
cacaugauuuggaauauacu

SEQ ID NO: 24994 - RNA, 20 nt, Artificial Sequence
  HTT spacer sequence GTCN PAM
ccaacccccaggcugcagag

SEQ ID NO: 24995 - RNA, 20 nt, Artificial Sequence
  HTT spacer sequence GTCN PAM
auggguccccaacccccagg

SEQ ID NO: 24996 - RNA, 20 nt, Artificial Sequence
  HTT spacer sequence GTCN PAM
ccaacccccaggcugcagag

SEQ ID NO: 24997 - RNA, 20 nt, Artificial Sequence
  HTT spacer sequence GTCN PAM
auggccuguuaggaaccagg

SEQ ID NO: 24998 - RNA, 20 nt, Artificial Sequence
  HTT spacer sequence GTCN PAM
gaucaguggcagcauuagau

SEQ ID NO: 24999 - RNA, 20 nt, Artificial Sequence
  HTT spacer sequence GTCN PAM
agguugugcgcuccuuauga

SEQ ID NO: 25000 - RNA, 20 nt, Artificial Sequence
  HTT spacer sequence GTCN PAM
cgucuugaaaccauccccug

SEQ ID NO: 25001 - RNA, 20 nt, Artificial Sequence
  HTT spacer sequence GTCN PAM
ugaaaccauccccuggcccu

SEQ ID NO: 25002 - RNA, 20 nt, Artificial Sequence
  HTT spacer sequence GTCN PAM
cccaugaaaccagucucugg

SEQ ID NO: 25003 - RNA, 20 nt, Artificial Sequence
  HTT spacer sequence GTCN PAM
cuggugccagaaagguuggg

SEQ ID NO: 25004 - RNA, 20 nt, Artificial Sequence
  HTT spacer sequence GTCN PAM
gguagcucuuucucaguggc

SEQ ID NO: 25005 - RNA, 20 nt, Artificial Sequence
  HTT spacer sequence GTCN PAM
agcugacucuccccuccgug

SEQ ID NO: 25006 - RNA, 20 nt, Artificial Sequence
  HTT spacer sequence GTCN PAM
gcuugacacacauuuaaaaa

SEQ ID NO: 25007 - RNA, 20 nt, Artificial Sequence
  HTT spacer sequence GTCN PAM
ccaguuuugggaaauagaga

SEQ ID NO: 25008 - RNA, 20 nt, Artificial Sequence
  HTT spacer sequence GTCN PAM
augaaguccuauuaaaaaca

SEQ ID NO: 25009 - RNA, 20 nt, Artificial Sequence
  HTT spacer sequence GTCN PAM
uauuaaaaacaacaaaaaag

SEQ ID NO: 25010 - RNA, 20 nt, Artificial Sequence
  HTT spacer sequence GTCN PAM
gaguuuauaaaaugcauccu

SEQ ID NO: 25011 - RNA, 20 nt, Artificial Sequence
  HTT spacer sequence GTCN PAM
guucauaaaccuagaaacag

SEQ ID NO: 25012 - RNA, 20 nt, Artificial Sequence
  HTT spacer sequence GTCN PAM
uggugcuguguaugauguaa

SEQ ID NO: 25013 - RNA, 20 nt, Artificial Sequence
  HTT spacer sequence GTCN PAM
caacauuguggucuuggugc

SEQ ID NO: 25014 - RNA, 20 nt, Artificial Sequence
  HTT spacer sequence GTCN PAM
ggguuugcagaagcucgggu

SEQ ID NO: 25015 - RNA, 20 nt, Artificial Sequence
  HTT spacer sequence GTCN PAM
ggggcauugggcagcucacc

SEQ ID NO: 25016 - RNA, 20 nt, Artificial Sequence
  HTT spacer sequence GTCN PAM
gguggccgaagccguagugg

SEQ ID NO: 25017 - RNA, 20 nt, Artificial Sequence
  HTT spacer sequence GTCN PAM
acucuuacaauuaacuuugc

SEQ ID NO: 25018 - RNA, 20 nt, Artificial Sequence
  HTT spacer sequence GTCN PAM
gcauuccaucuuccuugcca

SEQ ID NO: 25019 - RNA, 20 nt, Artificial Sequence
  HTT spacer sequence GTCN PAM
caaacuccugggcugaagcg

SEQ ID NO: 25020 - RNA, 20 nt, Artificial Sequence
  HTT spacer sequence GTCN PAM
cacuuggccagguugucuca

SEQ ID NO: 25021 - RNA, 20 nt, Artificial Sequence
  HTT spacer sequence GTCN PAM
cuacaaaaaaaaaaaaaaaa

SEQ ID NO: 25022 - RNA, 20 nt, Artificial Sequence
  HTT spacer sequence GTCN PAM
cagcugcuuuggaggcugag

SEQ ID NO: 25023 - RNA, 20 nt, Artificial Sequence
  HTT spacer sequence GTCN PAM
ccaggcucagugcagcugcc

SEQ ID NO: 25024 - RNA, 20 nt, Artificial Sequence
  HTT spacer sequence GTCN PAM
caaaauaaauuuaaaaauaa

SEQ ID NO: 25025 - RNA, 20 nt, Artificial Sequence
  HTT spacer sequence GTCN PAM
ucagagggaucugagaguuc

SEQ ID NO: 25026 - RNA, 20 nt, Artificial Sequence
  HTT spacer sequence GTCN PAM
gagggaucugagaguuccuu

SEQ ID NO: 25027 - RNA, 20 nt, Artificial Sequence
  HTT spacer sequence GTCN PAM
ggccaggaaggaacucucag

SEQ ID NO: 25028 - RNA, 20 nt, Artificial Sequence
  HTT spacer sequence GTCN PAM
guccccagcucugcgucugc

SEQ ID NO: 25029 - RNA, 20 nt, Artificial Sequence
  HTT spacer sequence GTCN PAM
ccagcucugcgucugccucc

SEQ ID NO: 25030 - RNA, 20 nt, Artificial Sequence
  HTT spacer sequence GTCN PAM
gccuccacugcccagucacc

SEQ ID NO: 25031 - RNA, 20 nt, Artificial Sequence
  HTT spacer sequence GTCN PAM
ccuccucuccaugcucuugg

SEQ ID NO: 25032 - RNA, 20 nt, Artificial Sequence
  HTT spacer sequence GTCN PAM
ugucuggcaugagagcugcc

SEQ ID NO: 25033 - RNA, 20 nt, Artificial Sequence
  HTT spacer sequence GTCN PAM
ggcaugagagcugccuuugg

SEQ ID NO: 25034 - RNA, 20 nt, Artificial Sequence
  HTT spacer sequence GTCN PAM
ggugccuagcaggcuaugga

SEQ ID NO: 25035 - RNA, 20 nt, Artificial Sequence
  HTT spacer sequence GTCN PAM
gcagaaguuuauccauagcc

SEQ ID NO: 25036 - RNA, 20 nt, Artificial Sequence
  HTT spacer sequence GTCN PAM
guguagugcacagugugugu

SEQ ID NO: 25037 - RNA, 20 nt, Artificial Sequence
  HTT spacer sequence GTCN PAM
gauucucucuaauguggagg

SEQ ID NO: 25038 - RNA, 20 nt, Artificial Sequence
  HTT spacer sequence GTCN PAM
uacugcugccucgugugaac

SEQ ID NO: 25039 - RNA, 20 nt, Artificial Sequence
  HTT spacer sequence GTCN PAM
uuuacacggaagaauuuuuu

SEQ ID NO: 25040 - RNA, 20 nt, Artificial Sequence
  HTT spacer sequence GTCN PAM
aguauaacuuuucauuagcg

SEQ ID NO: 25041 - RNA, 20 nt, Artificial Sequence
  HTT spacer sequence GTCN PAM
gcuaaauaaucugagauuuc

SEQ ID NO: 25042 - RNA, 20 nt, Artificial Sequence
  HTT spacer sequence GTCN PAM
uaucuuuagaacuauauauu

SEQ ID NO: 25043 - RNA, 20 nt, Artificial Sequence
  HTT spacer sequence GTCN PAM
cuuucugugauuugcagcug

SEQ ID NO: 25044 - RNA, 20 nt, Artificial Sequence
  HTT spacer sequence GTCN PAM
uuucaagaaaacaaaaaggu

SEQ ID NO: 25045 - RNA, 20 nt, Artificial Sequence
  HTT spacer sequence GTCN PAM
uguguugaaucuuacugauu

SEQ ID NO: 25046 - RNA, 20 nt, Artificial Sequence
  HTT spacer sequence GTCN PAM
aauacaguauuacaagaaau

SEQ ID NO: 25047 - RNA, 20 nt, Artificial Sequence
  HTT spacer sequence GTCN PAM
uaaauuuugaacgcaucaua

SEQ ID NO: 25048 - RNA, 20 nt, Artificial Sequence
  HTT spacer sequence GTCN PAM
gcagacuuuuuuuguaaagg

SEQ ID NO: 25049 - RNA, 20 nt, Artificial Sequence
  HTT spacer sequence GTCN PAM
gcugaccccgaacauuagaa

SEQ ID NO: 25050 - RNA, 20 nt, Artificial Sequence
  HTT spacer sequence GTCN PAM
cuuuacaaaaaaagucugcu

SEQ ID NO: 25051 - RNA, 20 nt, Artificial Sequence
  HTT spacer sequence GTCN PAM
cuuuugcaacauucagcucu

SEQ ID NO: 25052 - RNA, 20 nt, Artificial Sequence
  HTT spacer sequence GTCN PAM
cagggcagagcugaauguug

SEQ ID NO: 25053 - RNA, 20 nt, Artificial Sequence
  HTT spacer sequence GTCN PAM
uuacaacugcauuccuguca

SEQ ID NO: 25054 - RNA, 20 nt, Artificial Sequence
  HTT spacer sequence GTCN PAM
guuucuguaaguaaaguucu

SEQ ID NO: 25055 - RNA, 20 nt, Artificial Sequence
  HTT spacer sequence GTCN PAM
ggaauauuauuaaguagcuu

SEQ ID NO: 25056 - RNA, 20 nt, Artificial Sequence
  HTT spacer sequence GTCN PAM
acauagugagacccggucuc

SEQ ID NO: 25057 - RNA, 20 nt, Artificial Sequence
  HTT spacer sequence GTCN PAM
cacuauguugaccaggcugg

SEQ ID NO: 25058 - RNA, 20 nt, Artificial Sequence
  HTT spacer sequence GTCN PAM
cuaccaaaacaaaacaaaac

SEQ ID NO: 25059 - RNA, 20 nt, Artificial Sequence
  HTT spacer sequence GTCN PAM
cagugagcuguagucaugcc

SEQ ID NO: 25060 - RNA, 20 nt, Artificial Sequence
  HTT spacer sequence GTCN PAM
ugccacugcacuccagccua

SEQ ID NO: 25061 - RNA, 20 nt, Artificial Sequence
  HTT spacer sequence GTCN PAM
cauucuguugccuaggcugg

SEQ ID NO: 25062 - RNA, 20 nt, Artificial Sequence
  HTT spacer sequence GTCN PAM
uaaaaaaaaaaaguuuccuu

SEQ ID NO: 25063 - RNA, 20 nt, Artificial Sequence
  HTT spacer sequence GTCN PAM
aaauuaaaauaacccaacaa

SEQ ID NO: 25064 - RNA, 20 nt, Artificial Sequence
  HTT spacer sequence GTCN PAM
cuuucuauuuugaaaucuua

SEQ ID NO: 25065 - RNA, 20 nt, Artificial Sequence
  HTT spacer sequence GTCN PAM
uuuaagauuucaaaauagaa

SEQ ID NO: 25066 - RNA, 20 nt, Artificial Sequence
  HTT spacer sequence GTCN PAM
ugauuugaguauuuaauuga

SEQ ID NO: 25067 - RNA, 20 nt, Artificial Sequence
  HTT spacer sequence GTCN PAM
ucauaguaugagauacuuaa

SEQ ID NO: 25068 - RNA, 20 nt, Artificial Sequence
  HTT spacer sequence GTCN PAM
auauucuugaauuaggagag

SEQ ID NO: 25069 - RNA, 20 nt, Artificial Sequence
  HTT spacer sequence GTCN PAM
caaaaucucuccuaauucaa

SEQ ID NO: 25070 - RNA, 20 nt, Artificial Sequence
  HTT spacer sequence GTCN PAM
cacgucccaaaaucucuccu

SEQ ID NO: 25071 - RNA, 20 nt, Artificial Sequence
  HTT spacer sequence GTCN PAM
gcguaacuuagucacacguc

SEQ ID NO: 25072 - RNA, 20 nt, Artificial Sequence
  HTT spacer sequence GTCN PAM
cuuuuuccaguggcggugag

SEQ ID NO: 25073 - RNA, 20 nt, Artificial Sequence
  HTT spacer sequence GTCN PAM
ucuucguucucaccgccacu

SEQ ID NO: 25074 - RNA, 20 nt, Artificial Sequence
  HTT spacer sequence GTCN PAM
cagccagaagaggauaaacu

SEQ ID NO: 25075 - RNA, 20 nt, Artificial Sequence
  HTT spacer sequence GTCN PAM
cuuuuaagccuuuuugguau

SEQ ID NO: 25076 - RNA, 20 nt, Artificial Sequence
  HTT spacer sequence GTCN PAM
ucaaacucuucuguuauagc

SEQ ID NO: 25077 - RNA, 20 nt, Artificial Sequence
  HTT spacer sequence GTCN PAM
uauaauuugggcagauuuca

SEQ ID NO: 25078 - RNA, 20 nt, Artificial Sequence
  HTT spacer sequence GTCN PAM
uggagccucucuucuggugg

SEQ ID NO: 25079 - RNA, 20 nt, Artificial Sequence
  HTT spacer sequence GTCN PAM
ccaggguaauuuccucaaag

SEQ ID NO: 25080 - RNA, 20 nt, Artificial Sequence
  HTT spacer sequence GTCN PAM
gaaguaugauaacuuccaua

SEQ ID NO: 25081 - RNA, 20 nt, Artificial Sequence
  HTT spacer sequence GTCN PAM
uuuaaugacacucacaugug

SEQ ID NO: 25082 - RNA, 20 nt, Artificial Sequence
  HTT spacer sequence GTCN PAM
uuaaaugacacuaucaaaau

SEQ ID NO: 25083 - RNA, 20 nt, Artificial Sequence
  HTT spacer sequence GTCN PAM
uaauaugauuuaaaacugaa

SEQ ID NO: 25084 - RNA, 20 nt, Artificial Sequence
  HTT spacer sequence GTCN PAM
agaaaauuaaaagauaauaa

SEQ ID NO: 25085 - RNA, 20 nt, Artificial Sequence
  HTT spacer sequence GTCN PAM
cuuucauuuuauuaucuuuu

SEQ ID NO: 25086 - RNA, 20 nt, Artificial Sequence
  HTT spacer sequence GTCN PAM
uuggagcuaugacaugaaua

SEQ ID NO: 25087 - RNA, 20 nt, Artificial Sequence
  HTT spacer sequence GTCN PAM
uagcuccaaugacacaccag

SEQ ID NO: 25088 - RNA, 20 nt, Artificial Sequence
  HTT spacer sequence GTCN PAM
auaaaccuauauggaaaaag

SEQ ID NO: 25089 - RNA, 20 nt, Artificial Sequence
  HTT spacer sequence GTCN PAM
uuauuuuuagcaaacuaaaa

SEQ ID NO: 25090 - RNA, 20 nt, Artificial Sequence
  HTT spacer sequence GTCN PAM
uccuccaaggcuucuucuuc

SEQ ID NO: 25091 - RNA, 20 nt, Artificial Sequence
  HTT spacer sequence GTCN PAM
gcagcucugccuuaacaggu

SEQ ID NO: 25092 - RNA, 20 nt, Artificial Sequence
  HTT spacer sequence GTCN PAM
acaccagcggcuaacuagug

SEQ ID NO: 25093 - RNA, 20 nt, Artificial Sequence
  HTT spacer sequence GTCN PAM
gccuuccaccccuugcccuu

SEQ ID NO: 25094 - RNA, 20 nt, Artificial Sequence
  HTT spacer sequence GTCN PAM
cccugcaccugguggacagc

SEQ ID NO: 25095 - RNA, 20 nt, Artificial Sequence
  HTT spacer sequence GTCN PAM
accaggugcagggggacgag

SEQ ID NO: 25096 - RNA, 20 nt, Artificial Sequence
  HTT spacer sequence GTCN PAM
ugcuguccaccaggugcagg

SEQ ID NO: 25097 - RNA, 20 nt, Artificial Sequence
  HTT spacer sequence GTCN PAM
gugguguuugcaucauauau

SEQ ID NO: 25098 - RNA, 20 nt, Artificial Sequence
  HTT spacer sequence GTCN PAM
aaacaucucaugaguuggau

SEQ ID NO: 25099 - RNA, 20 nt, Artificial Sequence
  HTT spacer sequence GTCN PAM
cacacugucacccagugcag

SEQ ID NO: 25100 - RNA, 20 nt, Artificial Sequence
  HTT spacer sequence GTCN PAM
cccagugcagauacccagug

SEQ ID NO: 25101 - RNA, 20 nt, Artificial Sequence
  HTT spacer sequence GTCN PAM
cuggagugcaguggugugcu

SEQ ID NO: 25102 - RNA, 20 nt, Artificial Sequence
  HTT spacer sequence GTCN PAM
cagcuacuugggaggcugag

SEQ ID NO: 25103 - RNA, 20 nt, Artificial Sequence
  HTT spacer sequence GTCN PAM
ccacaaaaaaauacaaaaau

SEQ ID NO: 25104 - RNA, 20 nt, Artificial Sequence
  HTT spacer sequence GTCN PAM
ggcuggucuugaacuccuga

SEQ ID NO: 25105 - RNA, 20 nt, Artificial Sequence
  HTT spacer sequence GTCN PAM
ugaacuccugaccucaagug

SEQ ID NO: 25106 - RNA, 20 nt, Artificial Sequence
  HTT spacer sequence GTCN PAM
ggaguucaagaccagccuga

SEQ ID NO: 25107 - RNA, 20 nt, Artificial Sequence
  HTT spacer sequence GTCN PAM
uacuuucaguuauagcuaaa

SEQ ID NO: 25108 - RNA, 20 nt, Artificial Sequence
  HTT spacer sequence GTCN PAM
guaagcaugugagcuuuaua

SEQ ID NO: 25109 - RNA, 20 nt, Artificial Sequence
  HTT spacer sequence GTCN PAM
cuccuggggcaguugggucg

SEQ ID NO: 25110 - RNA, 20 nt, Artificial Sequence
  HTT spacer sequence GTCN PAM
accuuuuugccauaauuuuu

SEQ ID NO: 25111 - RNA, 20 nt, Artificial Sequence
  HTT spacer sequence GTCN PAM
acaugaagcuguuggcagug

SEQ ID NO: 25112 - RNA, 20 nt, Artificial Sequence
  HTT spacer sequence GTCN PAM
acuaggaaaauguguuacag

SEQ ID NO: 25113 - RNA, 20 nt, Artificial Sequence
  HTT spacer sequence GTCN PAM
uauucuccuggaagauaaac

SEQ ID NO: 25114 - RNA, 20 nt, Artificial Sequence
  HTT spacer sequence GTCN PAM
agaucuugaauguggcuugg

SEQ ID NO: 25115 - RNA, 20 nt, Artificial Sequence
  HTT spacer sequence GTCN PAM
acucaucucucugggguggg

SEQ ID NO: 25116 - RNA, 20 nt, Artificial Sequence
  HTT spacer sequence GTCN PAM
gaaacaacugucaacucauc

SEQ ID NO: 25117 - RNA, 20 nt, Artificial Sequence
  HTT spacer sequence GTCN PAM
gugaccgccuagcuuugcgc

SEQ ID NO: 25118 - RNA, 20 nt, Artificial Sequence
  HTT spacer sequence GTCN PAM
cagacacgcaggcccucuaa

SEQ ID NO: 25119 - RNA, 20 nt, Artificial Sequence
  HTT spacer sequence GTCN PAM
ggggcgcaaagcuaggcggu

SEQ ID NO: 25120 - RNA, 20 nt, Artificial Sequence
  HTT spacer sequence GTCN PAM
uuauauauugcuccagcuaa

SEQ ID NO: 25121 - RNA, 20 nt, Artificial Sequence
  HTT spacer sequence GTCN PAM
guuaagaacuugaacuucgg

SEQ ID NO: 25122 - RNA, 20 nt, Artificial Sequence
  HTT spacer sequence GTCN PAM
ugcauuucagcaucuucagg

SEQ ID NO: 25123 - RNA, 20 nt, Artificial Sequence
  HTT spacer sequence GTCN PAM
aauggcgagagaaaacauuc

SEQ ID NO: 25124 - RNA, 20 nt, Artificial Sequence
  HTT spacer sequence GTCN PAM
ucagccucagugaaggauga

SEQ ID NO: 25125 - RNA, 20 nt, Artificial Sequence
  HTT spacer sequence GTCN PAM
gcaggucaugacaucaucac

SEQ ID NO: 25126 - RNA, 20 nt, Artificial Sequence
  HTT spacer sequence GTCN PAM
ugacaucaucacagaacagc

SEQ ID NO: 25127 - RNA, 20 nt, Artificial Sequence
  HTT spacer sequence GTCN PAM
ugaccugcugacccuggagu

SEQ ID NO: 25128 - RNA, 20 nt, Artificial Sequence
  HTT spacer sequence GTCN PAM
cagcacacacugcaggcgga

SEQ ID NO: 25129 - RNA, 20 nt, Artificial Sequence
  HTT spacer sequence GTCN PAM
gccugcagugugugcuguga

SEQ ID NO: 25130 - RNA, 20 nt, Artificial Sequence
  HTT spacer sequence GTCN PAM
cagcuggccagauccacuga

SEQ ID NO: 25131 - RNA, 20 nt, Artificial Sequence
  HTT spacer sequence GTCN PAM
agucacagcuggccagaucc

SEQ ID NO: 25132 - RNA, 20 nt, Artificial Sequence
  HTT spacer sequence GTCN PAM
gcgccgucccaucugacccu

SEQ ID NO: 25133 - RNA, 20 nt, Artificial Sequence
  HTT spacer sequence GTCN PAM
caucugacccugccauggac

SEQ ID NO: 25134 - RNA, 20 nt, Artificial Sequence
  HTT spacer sequence GTCN PAM
gaugggacggcgcugaccug

SEQ ID NO: 25135 - RNA, 20 nt, Artificial Sequence
  HTT spacer sequence GTCN PAM
auggcagggucagaugggac

SEQ ID NO: 25136 - RNA, 20 nt, Artificial Sequence
  HTT spacer sequence GTCN PAM
caucauucagguccauggca

SEQ ID NO: 25137 - RNA, 20 nt, Artificial Sequence
  HTT spacer sequence GTCN PAM
cccaucagcgacagcuccca

SEQ ID NO: 25138 - RNA, 20 nt, Artificial Sequence
  HTT spacer sequence GTCN PAM
cugaugggcgacgaggccug

SEQ ID NO: 25139 - RNA, 20 nt, Artificial Sequence
  HTT spacer sequence GTCN PAM
gggagcugucgcugaugggc

SEQ ID NO: 25140 - RNA, 20 nt, Artificial Sequence
  HTT spacer sequence GTCN PAM
gaagggguaacagcugaauc

SEQ ID NO: 25141 - RNA, 20 nt, Artificial Sequence
  HTT spacer sequence GTCN PAM
ggccccucugcccacuuaca

SEQ ID NO: 25142 - RNA, 20 nt, Artificial Sequence
  HTT spacer sequence GTCN PAM
caaauaaaaaauaaaaaaaa

SEQ ID NO: 25143 - RNA, 20 nt, Artificial Sequence
  HTT spacer sequence GTCN PAM
cacuccauagugcaguggag

SEQ ID NO: 25144 - RNA, 20 nt, Artificial Sequence
  HTT spacer sequence GTCN PAM
cccaaagugcugggauuaca

SEQ ID NO: 25145 - RNA, 20 nt, Artificial Sequence
  HTT spacer sequence GTCN PAM
ggaguucgagaccagccugg

SEQ ID NO: 25146 - RNA, 20 nt, Artificial Sequence
  HTT spacer sequence GTCN PAM
cgaacuccugaccucaagug

SEQ ID NO: 25147 - RNA, 20 nt, Artificial Sequence
  HTT spacer sequence GTCN PAM
cuacuaaaaauacaaaaauu

SEQ ID NO: 25148 - RNA, 20 nt, Artificial Sequence
  HTT spacer sequence GTCN PAM
guagucccagcuguuaggga

SEQ ID NO: 25149 - RNA, 20 nt, Artificial Sequence
  HTT spacer sequence GTCN PAM
cagcuguuagggaggcugag

SEQ ID NO: 25150 - RNA, 20 nt, Artificial Sequence
  HTT spacer sequence GTCN PAM
cgaucucggcucauugcaac

SEQ ID NO: 25151 - RNA, 20 nt, Artificial Sequence
  HTT spacer sequence GTCN PAM
ugcucuguugcccgggcugg

SEQ ID NO: 25152 - RNA, 20 nt, Artificial Sequence
  HTT spacer sequence GTCN PAM
cuacugaaaauacaaacauu

SEQ ID NO: 25153 - RNA, 20 nt, Artificial Sequence
  HTT spacer sequence GTCN PAM
caaacuccugaccuuagaug

SEQ ID NO: 25154 - RNA, 20 nt, Artificial Sequence
  HTT spacer sequence GTCN PAM
ggaguuugagaccagccugg

SEQ ID NO: 25155 - RNA, 20 nt, Artificial Sequence
  HTT spacer sequence GTCN PAM
ccagggaagaacucaaaaga

SEQ ID NO: 25156 - RNA, 20 nt, Artificial Sequence
  HTT spacer sequence GTCN PAM
aggucuccagggaagaacuc

SEQ ID NO: 25157 - RNA, 20 nt, Artificial Sequence
  HTT spacer sequence GTCN PAM
auagggguauuagauaacaa

SEQ ID NO: 25158 - RNA, 20 nt, Artificial Sequence
  HTT spacer sequence GTCN PAM
agcucuccauuaaugaucua

SEQ ID NO: 25159 - RNA, 20 nt, Artificial Sequence
  HTT spacer sequence GTCN PAM
uuuguguugaacacugaggu

SEQ ID NO: 25160 - RNA, 20 nt, Artificial Sequence
  HTT spacer sequence GTCN PAM
uaaugaaaugugauuaauac

SEQ ID NO: 25161 - RNA, 20 nt, Artificial Sequence
  HTT spacer sequence GTCN PAM
aaaguucuuaaaauaaugca

SEQ ID NO: 25162 - RNA, 20 nt, Artificial Sequence
  HTT spacer sequence GTCN PAM
acuaacuuagagaugagaag

SEQ ID NO: 25163 - RNA, 20 nt, Artificial Sequence
  HTT spacer sequence GTCN PAM
aauaauguuugcuacaaguc

SEQ ID NO: 25164 - RNA, 20 nt, Artificial Sequence
  HTT spacer sequence GTCN PAM
auguugaguuuuauacucca

SEQ ID NO: 25165 - RNA, 20 nt, Artificial Sequence
  HTT spacer sequence GTCN PAM
uggaaucauugcuaccaccc

SEQ ID NO: 25166 - RNA, 20 nt, Artificial Sequence
  HTT spacer sequence GTCN PAM
cuggcaaccacgauucuucu

SEQ ID NO: 25167 - RNA, 20 nt, Artificial Sequence
  HTT spacer sequence GTCN PAM
ucugaauuugacuacuuugg

SEQ ID NO: 25168 - RNA, 20 nt, Artificial Sequence
  HTT spacer sequence GTCN PAM
aauucagaagacagaaagaa

SEQ ID NO: 25169 - RNA, 20 nt, Artificial Sequence
  HTT spacer sequence GTCN PAM
cacaguauuuguuuuacuua

SEQ ID NO: 25170 - RNA, 20 nt, Artificial Sequence
  HTT spacer sequence GTCN PAM
ccaaagcucaugcauguugu

SEQ ID NO: 25171 - RNA, 20 nt, Artificial Sequence
  HTT spacer sequence GTCN PAM
auggacacuuguauugcuuc

SEQ ID NO: 25172 - RNA, 20 nt, Artificial Sequence
  HTT spacer sequence GTCN PAM
auggacagaggaauggaaaa

SEQ ID NO: 25173 - RNA, 20 nt, Artificial Sequence
  HTT spacer sequence GTCN PAM
ccaggagcuaucuguacacc

SEQ ID NO: 25174 - RNA, 20 nt, Artificial Sequence
  HTT spacer sequence GTCN PAM
auuguucaguuuuuuuaggu

SEQ ID NO: 25175 - RNA, 20 nt, Artificial Sequence
  HTT spacer sequence GTCN PAM
uguguaauuuaccuaaaaaa

SEQ ID NO: 25176 - RNA, 20 nt, Artificial Sequence
  HTT spacer sequence GTCN PAM
acuugaaauguccuguguaa

SEQ ID NO: 25177 - RNA, 20 nt, Artificial Sequence
  HTT spacer sequence GTCN PAM
uugcaauuuaggagauaacc

SEQ ID NO: 25178 - RNA, 20 nt, Artificial Sequence
  HTT spacer sequence GTCN PAM
aaaagcuuuguccucauauu

SEQ ID NO: 25179 - RNA, 20 nt, Artificial Sequence
  HTT spacer sequence GTCN PAM
ucauauuuccaacuugcugu

SEQ ID NO: 25180 - RNA, 20 nt, Artificial Sequence
  HTT spacer sequence GTCN PAM
ucacaaacaaauuuuacagc

SEQ ID NO: 25181 - RNA, 20 nt, Artificial Sequence
  HTT spacer sequence GTCN PAM
acauuggaauuuuuuuggag

SEQ ID NO: 25182 - RNA, 20 nt, Artificial Sequence
  HTT spacer sequence GTCN PAM
uuuauuucaaggcacagaaa

SEQ ID NO: 25183 - RNA, 20 nt, Artificial Sequence
  HTT spacer sequence GTCN PAM
cuuggugaucacacuucaaa

SEQ ID NO: 25184 - RNA, 20 nt, Artificial Sequence
  HTT spacer sequence GTCN PAM
aacaccuaaacgguucaagg

SEQ ID NO: 25185 - RNA, 20 nt, Artificial Sequence
  HTT spacer sequence GTCN PAM
guaccgucuaacaccuaaac

SEQ ID NO: 25186 - RNA, 20 nt, Artificial Sequence
  HTT spacer sequence GTCN PAM
aaucugcaggcccaaauacu

SEQ ID NO: 25187 - RNA, 20 nt, Artificial Sequence
  HTT spacer sequence GTCN PAM
acauacccauggaagaguuc

SEQ ID NO: 25188 - RNA, 20 nt, Artificial Sequence
  HTT spacer sequence GTCN PAM
gaauacaaaccacuuuguag

SEQ ID NO: 25189 - RNA, 20 nt, Artificial Sequence
  HTT spacer sequence GTCN PAM
aggucugaauacaaaccacu

SEQ ID NO: 25190 - RNA, 20 nt, Artificial Sequence
  HTT spacer sequence GTCN PAM
uuugauacuguuuucugagu

SEQ ID NO: 25191 - RNA, 20 nt, Artificial Sequence
  HTT spacer sequence GTCN PAM
uuuucaucagcuauucagaa

SEQ ID NO: 25192 - RNA, 20 nt, Artificial Sequence
  HTT spacer sequence GTCN PAM
cuuaaucuugauuucucugu

SEQ ID NO: 25193 - RNA, 20 nt, Artificial Sequence
  HTT spacer sequence GTCN PAM
cugcaggcagccuucugaca

SEQ ID NO: 25194 - RNA, 20 nt, Artificial Sequence
  HTT spacer sequence GTCN PAM
gaaggcugccugcagugacu

SEQ ID NO: 25195 - RNA, 20 nt, Artificial Sequence
  HTT spacer sequence GTCN PAM
cucaccuuguuuucuugauc

SEQ ID NO: 25196 - RNA, 20 nt, Artificial Sequence
  HTT spacer sequence GTCN PAM
caagccuaugucccucaccu

SEQ ID NO: 25197 - RNA, 20 nt, Artificial Sequence
  HTT spacer sequence GTCN PAM
ucucaagccuaugucccuca

SEQ ID NO: 25198 - RNA, 20 nt, Artificial Sequence
  HTT spacer sequence GTCN PAM
acuuuauugcuuucccaucc

SEQ ID NO: 25199 - RNA, 20 nt, Artificial Sequence
  HTT spacer sequence GTCN PAM
ggggcacacucucaaaggag

SEQ ID NO: 25200 - RNA, 20 nt, Artificial Sequence
  HTT spacer sequence GTCN PAM
gauuucuuggaucauucauu

SEQ ID NO: 25201 - RNA, 20 nt, Artificial Sequence
  HTT spacer sequence GTCN PAM
cucuucauauuaucuuuuua

SEQ ID NO: 25202 - RNA, 20 nt, Artificial Sequence
  HTT spacer sequence GTCN PAM
ucacuuuuaauuccucaagg

SEQ ID NO: 25203 - RNA, 20 nt, Artificial Sequence
  HTT spacer sequence GTCN PAM
uugaggaauuaaaagugaag

SEQ ID NO: 25204 - RNA, 20 nt, Artificial Sequence
  HTT spacer sequence GTCN PAM
caucaaucagaauuauagcc

SEQ ID NO: 25205 - RNA, 20 nt, Artificial Sequence
  HTT spacer sequence GTCN PAM
uguagaagaccuuucaugcu

SEQ ID NO: 25206 - RNA, 20 nt, Artificial Sequence
  HTT spacer sequence GTCN PAM
ucuacaggacaagcagaagc

SEQ ID NO: 25207 - RNA, 20 nt, Artificial Sequence
  HTT spacer sequence GTCN PAM
acugccuucuuaccacgccc

SEQ ID NO: 25208 - RNA, 20 nt, Artificial Sequence
  HTT spacer sequence GTCN PAM
cagggcuguggcaggggaua

SEQ ID NO: 25209 - RNA, 20 nt, Artificial Sequence
  HTT spacer sequence GTCN PAM
ugcugccucugacuugucug

SEQ ID NO: 25210 - RNA, 20 nt, Artificial Sequence
  HTT spacer sequence GTCN PAM
gaggcagcaggacacagggu

SEQ ID NO: 25211 - RNA, 20 nt, Artificial Sequence
  HTT spacer sequence GTCN PAM
guuucugcuuggccaugguc

SEQ ID NO: 25212 - RNA, 20 nt, Artificial Sequence
  HTT spacer sequence GTCN PAM
cugugaggucaggugugcau

SEQ ID NO: 25213 - RNA, 20 nt, Artificial Sequence
  HTT spacer sequence GTCN PAM
ggugugcauaugggcacaaa

SEQ ID NO: 25214 - RNA, 20 nt, Artificial Sequence
  HTT spacer sequence GTCN PAM
cauacucaacaauacauuca

SEQ ID NO: 25215 - RNA, 20 nt, Artificial Sequence
  HTT spacer sequence GTCN PAM
uugucuccuuucuagccuug

SEQ ID NO: 25216 - RNA, 20 nt, Artificial Sequence
  HTT spacer sequence GTCN PAM
ccuuucuagccuugccgcau

SEQ ID NO: 25217 - RNA, 20 nt, Artificial Sequence
  HTT spacer sequence GTCN PAM
ccuuugaugcggcaaggcua

SEQ ID NO: 25218 - RNA, 20 nt, Artificial Sequence
  HTT spacer sequence GTCN PAM
aaugucaccuuugaugcggc

SEQ ID NO: 25219 - RNA, 20 nt, Artificial Sequence
  HTT spacer sequence GTCN PAM
acugaugaugacucugcacc

SEQ ID NO: 25220 - RNA, 20 nt, Artificial Sequence
  HTT spacer sequence GTCN PAM
ucaucaguggacuguccaau

SEQ ID NO: 25221 - RNA, 20 nt, Artificial Sequence
  HTT spacer sequence GTCN PAM
auuguguccgccuuuuaucu

SEQ ID NO: 25222 - RNA, 20 nt, Artificial Sequence
  HTT spacer sequence GTCN PAM
gccuuuuaucugcuucguuu

SEQ ID NO: 25223 - RNA, 20 nt, Artificial Sequence
  HTT spacer sequence GTCN PAM
gcuugguggccuguuuuugc

SEQ ID NO: 25224 - RNA, 20 nt, Artificial Sequence
  HTT spacer sequence GTCN PAM
gguuuuguucauuugaaaac

SEQ ID NO: 25225 - RNA, 20 nt, Artificial Sequence
  HTT spacer sequence GTCN PAM
ggaaccagcacugccaagaa

SEQ ID NO: 25226 - RNA, 20 nt, Artificial Sequence
  HTT spacer sequence GTCN PAM
gcgugaaggcccuggcccuc

SEQ ID NO: 25227 - RNA, 20 nt, Artificial Sequence
  HTT spacer sequence GTCN PAM
agaggaacuuuauagaguuu

SEQ ID NO: 25228 - RNA, 20 nt, Artificial Sequence
  HTT spacer sequence GTCN PAM
auacugaaauaguuuuuaca

SEQ ID NO: 25229 - RNA, 20 nt, Artificial Sequence
  HTT spacer sequence GTCN PAM
aauaucccaaaugaacucaa

SEQ ID NO: 25230 - RNA, 20 nt, Artificial Sequence
  HTT spacer sequence GTCN PAM
caguggcgcugagucgcacu

SEQ ID NO: 25231 - RNA, 20 nt, Artificial Sequence
  HTT spacer sequence GTCN PAM
cacucagccaggccaggcau

SEQ ID NO: 25232 - RNA, 20 nt, Artificial Sequence
  HTT spacer sequence GTCN PAM
ugguucccacucacccugag

SEQ ID NO: 25233 - RNA, 20 nt, Artificial Sequence
  HTT spacer sequence GTCN PAM
acugcugccucagccagucc

SEQ ID NO: 25234 - RNA, 20 nt, Artificial Sequence
  HTT spacer sequence GTCN PAM
ccaucgcgcccaugcuuacu

SEQ ID NO: 25235 - RNA, 20 nt, Artificial Sequence
  HTT spacer sequence GTCN PAM
gauaauaaaucugauuaaaa

SEQ ID NO: 25236 - RNA, 20 nt, Artificial Sequence
  HTT spacer sequence GTCN PAM
gugguauugaggacauauug

SEQ ID NO: 25237 - RNA, 20 nt, Artificial Sequence
  HTT spacer sequence GTCN PAM
ucaauaccacagacuuucug

SEQ ID NO: 25238 - RNA, 20 nt, Artificial Sequence
  HTT spacer sequence GTCN PAM
uuucugaauuuggaucuucu

SEQ ID NO: 25239 - RNA, 20 nt, Artificial Sequence
  HTT spacer sequence GTCN PAM
cagacaucuugaacuacauc

SEQ ID NO: 25240 - RNA, 20 nt, Artificial Sequence
  HTT spacer sequence GTCN PAM
gagacauacuguuccucugu

SEQ ID NO: 25241 - RNA, 20 nt, Artificial Sequence
  HTT spacer sequence GTCN PAM
ccaugaucgauguaguucaa

SEQ ID NO: 25242 - RNA, 20 nt, Artificial Sequence
  HTT spacer sequence GTCN PAM
cacagagaauggcaguggcu

SEQ ID NO: 25243 - RNA, 20 nt, Artificial Sequence
  HTT spacer sequence GTCN PAM
cgcuuccacgugggagauug

SEQ ID NO: 25244 - RNA, 20 nt, Artificial Sequence
  HTT spacer sequence GTCN PAM
ucuguuacuugcaaguuagc

SEQ ID NO: 25245 - RNA, 20 nt, Artificial Sequence
  HTT spacer sequence GTCN PAM
acuaagugaagaaaugguuc

SEQ ID NO: 25246 - RNA, 20 nt, Artificial Sequence
  HTT spacer sequence GTCN PAM
auuucaaacaaauauucuga

SEQ ID NO: 25247 - RNA, 20 nt, Artificial Sequence
  HTT spacer sequence GTCN PAM
guugaauaugcugggcacgg

SEQ ID NO: 25248 - RNA, 20 nt, Artificial Sequence
  HTT spacer sequence GTCN PAM
ccgugcccagcauauucaac

SEQ ID NO: 25249 - RNA, 20 nt, Artificial Sequence
  HTT spacer sequence GTCN PAM
gauuacaggugugagucacc

SEQ ID NO: 25250 - RNA, 20 nt, Artificial Sequence
  HTT spacer sequence GTCN PAM
ugaacuccugggcucaagca

SEQ ID NO: 25251 - RNA, 20 nt, Artificial Sequence
  HTT spacer sequence GTCN PAM
acuauguugcccauagucuu

SEQ ID NO: 25252 - RNA, 20 nt, Artificial Sequence
  HTT spacer sequence GTCN PAM
cuacagaaaauuaaaaaaaa

SEQ ID NO: 25253 - RNA, 20 nt, Artificial Sequence
  HTT spacer sequence GTCN PAM
cagcuacucgggaagcugag

SEQ ID NO: 25254 - RNA, 20 nt, Artificial Sequence
  HTT spacer sequence GTCN PAM
cacucuguugcccaggcuag

SEQ ID NO: 25255 - RNA, 20 nt, Artificial Sequence
  HTT spacer sequence GTCN PAM
caaaaauaauaguaauaaua

SEQ ID NO: 25256 - RNA, 20 nt, Artificial Sequence
  HTT spacer sequence GTCN PAM
caacuggccagucaacaaga

SEQ ID NO: 25257 - RNA, 20 nt, Artificial Sequence
  HTT spacer sequence GTCN PAM
acaagaguaaaaauuaacug

SEQ ID NO: 25258 - RNA, 20 nt, Artificial Sequence
  HTT spacer sequence GTCN PAM
aauuugugggauaacucccc

SEQ ID NO: 25259 - RNA, 20 nt, Artificial Sequence
  HTT spacer sequence GTCN PAM
ugccugacaguaauuucucu

SEQ ID NO: 25260 - RNA, 20 nt, Artificial Sequence
  HTT spacer sequence GTCN PAM
ggcaugacauuuuaaaaggg

SEQ ID NO: 25261 - RNA, 20 nt, Artificial Sequence
  HTT spacer sequence GTCN PAM
guugugucuuuuuugagcag

SEQ ID NO: 25262 - RNA, 20 nt, Artificial Sequence
  HTT spacer sequence GTCN PAM
uuuuugagcagaaggaagca

SEQ ID NO: 25263 - RNA, 20 nt, Artificial Sequence
  HTT spacer sequence GTCN PAM
uugugucagccaugcaugug

SEQ ID NO: 25264 - RNA, 20 nt, Artificial Sequence
  HTT spacer sequence GTCN PAM
gccaugcaugugauggugcc

SEQ ID NO: 25265 - RNA, 20 nt, Artificial Sequence
  HTT spacer sequence GTCN PAM
cuauguacuccacagcacga

SEQ ID NO: 25266 - RNA, 20 nt, Artificial Sequence
  HTT spacer sequence GTCN PAM
uugguguaggucccuuguuc

SEQ ID NO: 25267 - RNA, 20 nt, Artificial Sequence
  HTT spacer sequence GTCN PAM
cuuguuccuaccccuggguc

SEQ ID NO: 25268 - RNA, 20 nt, Artificial Sequence
  HTT spacer sequence GTCN PAM
gagauuuauuuagaaguggu

SEQ ID NO: 25269 - RNA, 20 nt, Artificial Sequence
  HTT spacer sequence GTCN PAM
ugguuucaacucucaaacag

SEQ ID NO: 25270 - RNA, 20 nt, Artificial Sequence
  HTT spacer sequence GTCN PAM
cuuucacauaacugguucuu

SEQ ID NO: 25271 - RNA, 20 nt, Artificial Sequence
  HTT spacer sequence GTCN PAM
cucuucaacacacaauguuc

SEQ ID NO: 25272 - RNA, 20 nt, Artificial Sequence
  HTT spacer sequence GTCN PAM
agacgcggguacugaguggg

SEQ ID NO: 25273 - RNA, 20 nt, Artificial Sequence
  HTT spacer sequence GTCN PAM
ugacgguuugagaaccguca

SEQ ID NO: 25274 - RNA, 20 nt, Artificial Sequence
  HTT spacer sequence GTCN PAM
cacucaguacccgcgucuug

SEQ ID NO: 25275 - RNA, 20 nt, Artificial Sequence
  HTT spacer sequence GTCN PAM
ucuugccuuggaccuugugu

SEQ ID NO: 25276 - RNA, 20 nt, Artificial Sequence
  HTT spacer sequence GTCN PAM
aaggcaagaggacagcaggu

SEQ ID NO: 25277 - RNA, 20 nt, Artificial Sequence
  HTT spacer sequence GTCN PAM
ugagucucugcagcagcagc

SEQ ID NO: 25278 - RNA, 20 nt, Artificial Sequence
  HTT spacer sequence GTCN PAM
cugcagcagcagcuacagug

SEQ ID NO: 25279 - RNA, 20 nt, Artificial Sequence
  HTT spacer sequence GTCN PAM
uaacucacuguagcugcugc

SEQ ID NO: 25280 - RNA, 20 nt, Artificial Sequence
  HTT spacer sequence GTCN PAM
gcacaucgaugaucagcugc

SEQ ID NO: 25281 - RNA, 20 nt, Artificial Sequence
  HTT spacer sequence GTCN PAM
ucaccagccaauaggaacug

SEQ ID NO: 25282 - RNA, 20 nt, Artificial Sequence
  HTT spacer sequence GTCN PAM
aucucugcaaggguuuccag

SEQ ID NO: 25283 - RNA, 20 nt, Artificial Sequence
  HTT spacer sequence GTCN PAM
cauccauuagauuucaugaa

SEQ ID NO: 25284 - RNA, 20 nt, Artificial Sequence
  HTT spacer sequence GTCN PAM
aucagaaauccgagugguuu

SEQ ID NO: 25285 - RNA, 20 nt, Artificial Sequence
  HTT spacer sequence GTCN PAM
ucuaccuaaaccacucggau

SEQ ID NO: 25286 - RNA, 20 nt, Artificial Sequence
  HTT spacer sequence GTCN PAM
cuaaauaaauaauaaaauaa

SEQ ID NO: 25287 - RNA, 20 nt, Artificial Sequence
  HTT spacer sequence GTCN PAM
cccaggcuugaaugcaguag

SEQ ID NO: 25288 - RNA, 20 nt, Artificial Sequence
  HTT spacer sequence GTCN PAM
uagaguucaaagcuucagug

SEQ ID NO: 25289 - RNA, 20 nt, Artificial Sequence
  HTT spacer sequence GTCN PAM
uccugccucagccucccgau

SEQ ID NO: 25290 - RNA, 20 nt, Artificial Sequence
  HTT spacer sequence GTCN PAM
cacuggcuaauauuuuuugu

SEQ ID NO: 25291 - RNA, 20 nt, Artificial Sequence
  HTT spacer sequence GTCN PAM
ugcuauguugcccaggcugg

SEQ ID NO: 25292 - RNA, 20 nt, Artificial Sequence
  HTT spacer sequence GTCN PAM
caaacuccugggcuugauug

SEQ ID NO: 25293 - RNA, 20 nt, Artificial Sequence
  HTT spacer sequence GTCN PAM
ucgucauuuaaguauucugg

SEQ ID NO: 25294 - RNA, 20 nt, Artificial Sequence
  HTT spacer sequence GTCN PAM
uuuaaguauucuggauagug

SEQ ID NO: 25295 - RNA, 20 nt, Artificial Sequence
  HTT spacer sequence GTCN PAM
uaaacuuuuaaaaaaaugua

SEQ ID NO: 25296 - RNA, 20 nt, Artificial Sequence
  HTT spacer sequence GTCN PAM
uaccuagguucaguauaaug

SEQ ID NO: 25297 - RNA, 20 nt, Artificial Sequence
  HTT spacer sequence GTCN PAM
cacucuguugccaggcugaa

SEQ ID NO: 25298 - RNA, 20 nt, Artificial Sequence
  HTT spacer sequence GTCN PAM
cuaucuguggguggagccga

SEQ ID NO: 25299 - RNA, 20 nt, Artificial Sequence
  HTT spacer sequence GTCN PAM
uuugaaauaguauuuauuuu

SEQ ID NO: 25300 - RNA, 20 nt, Artificial Sequence
  HTT spacer sequence GTCN PAM
uauugagucuggaauuguga

SEQ ID NO: 25301 - RNA, 20 nt, Artificial Sequence
  HTT spacer sequence GTCN PAM
ggaauugugagaggaaugcc

SEQ ID NO: 25302 - RNA, 20 nt, Artificial Sequence
  HTT spacer sequence GTCN PAM
uuccagggcaccuggaugag

SEQ ID NO: 25303 - RNA, 20 nt, Artificial Sequence
  HTT spacer sequence GTCN PAM
uguuuuagauguuuauuuca

SEQ ID NO: 25304 - RNA, 20 nt, Artificial Sequence
  HTT spacer sequence GTCN PAM
uauggauuuaagucuaguaa

SEQ ID NO: 25305 - RNA, 20 nt, Artificial Sequence
  HTT spacer sequence GTCN PAM
aguaauguugaguucuuucu

SEQ ID NO: 25306 - RNA, 20 nt, Artificial Sequence
  HTT spacer sequence GTCN PAM
aauacaagauuauguuuauu

SEQ ID NO: 25307 - RNA, 20 nt, Artificial Sequence
  HTT spacer sequence GTCN PAM
uccauuugcuuggagaugaa

SEQ ID NO: 25308 - RNA, 20 nt, Artificial Sequence
  HTT spacer sequence GTCN PAM
ucaucuccaagcaaauggau

SEQ ID NO: 25309 - RNA, 20 nt, Artificial Sequence
  HTT spacer sequence GTCN PAM
cacccuggggucuucaucuc

SEQ ID NO: 25310 - RNA, 20 nt, Artificial Sequence
  HTT spacer sequence GTCN PAM
aaaauuauaauuaaaaaaac

SEQ ID NO: 25311 - RNA, 20 nt, Artificial Sequence
  HTT spacer sequence GTCN PAM
auuguaaaaaguaaugcacu

SEQ ID NO: 25312 - RNA, 20 nt, Artificial Sequence
  HTT spacer sequence GTCN PAM
aaaauuuuuacaaugaaagu

SEQ ID NO: 25313 - RNA, 20 nt, Artificial Sequence
  HTT spacer sequence GTCN PAM
aaauuacaugcaauuuugua

SEQ ID NO: 25314 - RNA, 20 nt, Artificial Sequence
  HTT spacer sequence GTCN PAM
gauuacaaaauugcauguaa

SEQ ID NO: 25315 - RNA, 20 nt, Artificial Sequence
  HTT spacer sequence GTCN PAM
uuguuuugcuaugcgguugg

SEQ ID NO: 25316 - RNA, 20 nt, Artificial Sequence
  HTT spacer sequence GTCN PAM
caaaaaaaaaauaaaaaaaa

SEQ ID NO: 25317 - RNA, 20 nt, Artificial Sequence
  HTT spacer sequence GTCN PAM
ugcucuauuguccaggugcu

SEQ ID NO: 25318 - RNA, 20 nt, Artificial Sequence
  HTT spacer sequence GTCN PAM
aggugcuaucucggcucacu

SEQ ID NO: 25319 - RNA, 20 nt, Artificial Sequence
  HTT spacer sequence GTCN PAM
cccugguucaagcgauucuc

SEQ ID NO: 25320 - RNA, 20 nt, Artificial Sequence
  HTT spacer sequence GTCN PAM
cuacuaaaaauacaaaaauu

SEQ ID NO: 25321 - RNA, 20 nt, Artificial Sequence
  HTT spacer sequence GTCN PAM
cgaacuucugaccccgugau

SEQ ID NO: 25322 - RNA, 20 nt, Artificial Sequence
  HTT spacer sequence GTCN PAM
gaaguucgagaccagccugg

SEQ ID NO: 25323 - RNA, 20 nt, Artificial Sequence
  HTT spacer sequence GTCN PAM
ccccaaauguauccuugugc

SEQ ID NO: 25324 - RNA, 20 nt, Artificial Sequence
  HTT spacer sequence GTCN PAM
cuuaagauuuguguuuucgc

SEQ ID NO: 25325 - RNA, 20 nt, Artificial Sequence
  HTT spacer sequence GTCN PAM
ggaguucgagaccagccugg

SEQ ID NO: 25326 - RNA, 20 nt, Artificial Sequence
  HTT spacer sequence GTCN PAM
cgaacuccugaccucaagug

SEQ ID NO: 25327 - RNA, 20 nt, Artificial Sequence
  HTT spacer sequence GTCN PAM
cuacuaaaaauacaaaaauu

SEQ ID NO: 25328 - RNA, 20 nt, Artificial Sequence
  HTT spacer sequence GTCN PAM
gaugugguggcacacgccug

SEQ ID NO: 25329 - RNA, 20 nt, Artificial Sequence
  HTT spacer sequence GTCN PAM
cucucuguugcccagguugg

SEQ ID NO: 25330 - RNA, 20 nt, Artificial Sequence
  HTT spacer sequence GTCN PAM
caaaacaaacaaagauuugu

SEQ ID NO: 25331 - RNA, 20 nt, Artificial Sequence
  HTT spacer sequence GTCN PAM
agaaaauacaaaucuuuguu

SEQ ID NO: 25332 - RNA, 20 nt, Artificial Sequence
  HTT spacer sequence GTCN PAM
uaguauagauggacuuuugc

SEQ ID NO: 25333 - RNA, 20 nt, Artificial Sequence
  HTT spacer sequence GTCN PAM
aucuauacuaugaccccagu

SEQ ID NO: 25334 - RNA, 20 nt, Artificial Sequence
  HTT spacer sequence GTCN PAM
acacaaaaucuugcaggcaa

SEQ ID NO: 25335 - RNA, 20 nt, Artificial Sequence
  HTT spacer sequence GTCN PAM
ucauuucucuugaguagauc

SEQ ID NO: 25336 - RNA, 20 nt, Artificial Sequence
  HTT spacer sequence GTCN PAM
gagauuuuaguacaccuguc

SEQ ID NO: 25337 - RNA, 20 nt, Artificial Sequence
  HTT spacer sequence GTCN PAM
cccgaguaguguaccuugua

SEQ ID NO: 25338 - RNA, 20 nt, Artificial Sequence
  HTT spacer sequence GTCN PAM
cucaccuuccagccuuccgc

SEQ ID NO: 25339 - RNA, 20 nt, Artificial Sequence
  HTT spacer sequence GTCN PAM
ccaauguccauuauaccaca

SEQ ID NO: 25340 - RNA, 20 nt, Artificial Sequence
  HTT spacer sequence GTCN PAM
auuauaccacacuguaugcc

SEQ ID NO: 25341 - RNA, 20 nt, Artificial Sequence
  HTT spacer sequence GTCN PAM
cauucuaugaugcccaggcu

SEQ ID NO: 25342 - RNA, 20 nt, Artificial Sequence
  HTT spacer sequence GTCN PAM
cugccucccagguucaagug

SEQ ID NO: 25343 - RNA, 20 nt, Artificial Sequence
  HTT spacer sequence GTCN PAM
gccucccaggaagcuggaau

SEQ ID NO: 25344 - RNA, 20 nt, Artificial Sequence
  HTT spacer sequence GTCN PAM
ggccaacauggugaaacccc

SEQ ID NO: 25345 - RNA, 20 nt, Artificial Sequence
  HTT spacer sequence GTCN PAM
caagcuccugaccucaagug

SEQ ID NO: 25346 - RNA, 20 nt, Artificial Sequence
  HTT spacer sequence GTCN PAM
ggagcuugagaccagucugg

SEQ ID NO: 25347 - RNA, 20 nt, Artificial Sequence
  HTT spacer sequence GTCN PAM
cacaaguaaucaaagaaaug

SEQ ID NO: 25348 - RNA, 20 nt, Artificial Sequence
  HTT spacer sequence GTCN PAM
uauaaaccuauuaaguaaau

SEQ ID NO: 25349 - RNA, 20 nt, Artificial Sequence
  HTT spacer sequence GTCN PAM
ccacaaacaaacaaacaaaa

SEQ ID NO: 25350 - RNA, 20 nt, Artificial Sequence
  HTT spacer sequence GTCN PAM
cgcucugucacucaggcagg

SEQ ID NO: 25351 - RNA, 20 nt, Artificial Sequence
  HTT spacer sequence GTCN PAM
cucaggcaggaaugcagugg

SEQ ID NO: 25352 - RNA, 20 nt, Artificial Sequence
  HTT spacer sequence GTCN PAM
cccugucucggccucccaaa

SEQ ID NO: 25353 - RNA, 20 nt, Artificial Sequence
  HTT spacer sequence GTCN PAM
cggccucccaaagugcuggg

SEQ ID NO: 25354 - RNA, 20 nt, Artificial Sequence
  HTT spacer sequence GTCN PAM
ccaugaggaaagagacuuua

SEQ ID NO: 25355 - RNA, 20 nt, Artificial Sequence
  HTT spacer sequence GTCN PAM
cuuuccucauggagacuuga

SEQ ID NO: 25356 - RNA, 20 nt, Artificial Sequence
  HTT spacer sequence GTCN PAM
gcaagccccaugaucuucaa

SEQ ID NO: 25357 - RNA, 20 nt, Artificial Sequence
  HTT spacer sequence GTCN PAM
caaacacucccagauggcaa

SEQ ID NO: 25358 - RNA, 20 nt, Artificial Sequence
  HTT spacer sequence GTCN PAM
gcaaaacugucccaaacacu

SEQ ID NO: 25359 - RNA, 20 nt, Artificial Sequence
  HTT spacer sequence GTCN PAM
gaaugccagcugcauuccuu

SEQ ID NO: 25360 - RNA, 20 nt, Artificial Sequence
  HTT spacer sequence GTCN PAM
acagaguacugagcacagag

SEQ ID NO: 25361 - RNA, 20 nt, Artificial Sequence
  HTT spacer sequence GTCN PAM
guccacagaguacugagcac

SEQ ID NO: 25362 - RNA, 20 nt, Artificial Sequence
  HTT spacer sequence GTCN PAM
uaaaauuuaaucccuuucua

SEQ ID NO: 25363 - RNA, 20 nt, Artificial Sequence
  HTT spacer sequence GTCN PAM
gucauaaaauuuaaucccuu

SEQ ID NO: 25364 - RNA, 20 nt, Artificial Sequence
  HTT spacer sequence GTCN PAM
ggaguucaagaguucaagaa

SEQ ID NO: 25365 - RNA, 20 nt, Artificial Sequence
  HTT spacer sequence GTCN PAM
cuacuaaaacuacaaaaauu

SEQ ID NO: 25366 - RNA, 20 nt, Artificial Sequence
  HTT spacer sequence GTCN PAM
agguucaagugauucuccug

SEQ ID NO: 25367 - RNA, 20 nt, Artificial Sequence
  HTT spacer sequence GTCN PAM
cucuguggcccaggccggag

SEQ ID NO: 25368 - RNA, 20 nt, Artificial Sequence
  HTT spacer sequence GTCN PAM
caaaaaaaaaaaaaaaagaa

SEQ ID NO: 25369 - RNA, 20 nt, Artificial Sequence
  HTT spacer sequence GTCN PAM
gagugggugcaugagaguga

SEQ ID NO: 25370 - RNA, 20 nt, Artificial Sequence
  HTT spacer sequence GTCN PAM
cucucaugcacccacucgga

SEQ ID NO: 25371 - RNA, 20 nt, Artificial Sequence
  HTT spacer sequence GTCN PAM
ccaaucucagggucacucuc

SEQ ID NO: 25372 - RNA, 20 nt, Artificial Sequence
  HTT spacer sequence GTCN PAM
cgugcuugaagaacgccacc

SEQ ID NO: 25373 - RNA, 20 nt, Artificial Sequence
  HTT spacer sequence GTCN PAM
gcugguaaccagagguguug

SEQ ID NO: 25374 - RNA, 20 nt, Artificial Sequence
  HTT spacer sequence GTCN PAM
aucacaggugaguuucaucu

SEQ ID NO: 25375 - RNA, 20 nt, Artificial Sequence
  HTT spacer sequence GTCN PAM
caaagcuguuuuauaaaugu

SEQ ID NO: 25376 - RNA, 20 nt, Artificial Sequence
  HTT spacer sequence GTCN PAM
cauuuauaaaacagcuuugg

SEQ ID NO: 25377 - RNA, 20 nt, Artificial Sequence
  HTT spacer sequence GTCN PAM
uuggucacauuuauaaaaca

SEQ ID NO: 25378 - RNA, 20 nt, Artificial Sequence
  HTT spacer sequence GTCN PAM
caugcaugagaaguuucagg

SEQ ID NO: 25379 - RNA, 20 nt, Artificial Sequence
  HTT spacer sequence GTCN PAM
gcacaauaaccagguaugcu

SEQ ID NO: 25380 - RNA, 20 nt, Artificial Sequence
  HTT spacer sequence GTCN PAM
gcauaccugguuauugugcu

SEQ ID NO: 25381 - RNA, 20 nt, Artificial Sequence
  HTT spacer sequence GTCN PAM
ggaaaaugcccuuuccugau

SEQ ID NO: 25382 - RNA, 20 nt, Artificial Sequence
  HTT spacer sequence GTCN PAM
guccuuugauaggauauuau

SEQ ID NO: 25383 - RNA, 20 nt, Artificial Sequence
  HTT spacer sequence GTCN PAM
uuugauaggauauuaucauu

SEQ ID NO: 25384 - RNA, 20 nt, Artificial Sequence
  HTT spacer sequence GTCN PAM
auccucaaaaugauaauauc

SEQ ID NO: 25385 - RNA, 20 nt, Artificial Sequence
  HTT spacer sequence GTCN PAM
cagcugagugauuguggcag

SEQ ID NO: 25386 - RNA, 20 nt, Artificial Sequence
  HTT spacer sequence GTCN PAM
gcacauggaauguaauaaac

SEQ ID NO: 25387 - RNA, 20 nt, Artificial Sequence
  HTT spacer sequence GTCN PAM
caaacaaaaauacaacuguc

SEQ ID NO: 25388 - RNA, 20 nt, Artificial Sequence
  HTT spacer sequence GTCN PAM
guguuauuuaggguuaucca

SEQ ID NO: 25389 - RNA, 20 nt, Artificial Sequence
  HTT spacer sequence GTCN PAM
aauggccacauauaucccau

SEQ ID NO: 25390 - RNA, 20 nt, Artificial Sequence
  HTT spacer sequence GTCN PAM
cacucaccuaagaagcagau

SEQ ID NO: 25391 - RNA, 20 nt, Artificial Sequence
  HTT spacer sequence GTCN PAM
uaucacuucugcaaucuucu

SEQ ID NO: 25392 - RNA, 20 nt, Artificial Sequence
  HTT spacer sequence GTCN PAM
uuuaaauguuauuuuaaaaa

SEQ ID NO: 25393 - RNA, 20 nt, Artificial Sequence
  HTT spacer sequence GTCN PAM
aaguuuuguaaaacacuguu

SEQ ID NO: 25394 - RNA, 20 nt, Artificial Sequence
  HTT spacer sequence GTCN PAM
uuuaguccaaguuuuguaaa

SEQ ID NO: 25395 - RNA, 20 nt, Artificial Sequence
  HTT spacer sequence GTCN PAM
uaauuccugaauaaauaacg

SEQ ID NO: 25396 - RNA, 20 nt, Artificial Sequence
  HTT spacer sequence GTCN PAM
uuuuucauguaaagacugcu

SEQ ID NO: 25397 - RNA, 20 nt, Artificial Sequence
  HTT spacer sequence GTCN PAM
uuacaugaaaaaagacguua

SEQ ID NO: 25398 - RNA, 20 nt, Artificial Sequence
  HTT spacer sequence GTCN PAM
cuugagcucagggguucaag

SEQ ID NO: 25399 - RNA, 20 nt, Artificial Sequence
  HTT spacer sequence GTCN PAM
ugaaccccugagcucaagcg

SEQ ID NO: 25400 - RNA, 20 nt, Artificial Sequence
  HTT spacer sequence GTCN PAM
cacucuguagcccaagcugg

SEQ ID NO: 25401 - RNA, 20 nt, Artificial Sequence
  HTT spacer sequence GTCN PAM
caaaaaaagacacacacaca

SEQ ID NO: 25402 - RNA, 20 nt, Artificial Sequence
  HTT spacer sequence GTCN PAM
uuuuuugagacagagucuca

SEQ ID NO: 25403 - RNA, 20 nt, Artificial Sequence
  HTT spacer sequence GTCN PAM
ccauguuuuuuuuguuugug

SEQ ID NO: 25404 - RNA, 20 nt, Artificial Sequence
  HTT spacer sequence GTCN PAM
ugaaucuucuccaagagaga

SEQ ID NO: 25405 - RNA, 20 nt, Artificial Sequence
  HTT spacer sequence GTCN PAM
uuucagaagaugaauauuua

SEQ ID NO: 25406 - RNA, 20 nt, Artificial Sequence
  HTT spacer sequence GTCN PAM
cccaguuccaaacuucagca

SEQ ID NO: 25407 - RNA, 20 nt, Artificial Sequence
  HTT spacer sequence GTCN PAM
agaggccugcugaaguuugg

SEQ ID NO: 25408 - RNA, 20 nt, Artificial Sequence
  HTT spacer sequence GTCN PAM
auugggucuugcgugauaga

SEQ ID NO: 25409 - RNA, 20 nt, Artificial Sequence
  HTT spacer sequence GTCN PAM
ugcgugauagauacaaugac

SEQ ID NO: 25410 - RNA, 20 nt, Artificial Sequence
  HTT spacer sequence GTCN PAM
uuguaucuaucacgcaagac

SEQ ID NO: 25411 - RNA, 20 nt, Artificial Sequence
  HTT spacer sequence GTCN PAM
ccguggacaagacacuguga

SEQ ID NO: 25412 - RNA, 20 nt, Artificial Sequence
  HTT spacer sequence GTCN PAM
acggagacacucaacaaaac

SEQ ID NO: 25413 - RNA, 20 nt, Artificial Sequence
  HTT spacer sequence GTCN PAM
uguccacggagacacucaac

SEQ ID NO: 25414 - RNA, 20 nt, Artificial Sequence
  HTT spacer sequence GTCN PAM
auuucuaucccccauuauag

SEQ ID NO: 25415 - RNA, 20 nt, Artificial Sequence
  HTT spacer sequence GTCN PAM
gccccgaacacuuuugcugc

SEQ ID NO: 25416 - RNA, 20 nt, Artificial Sequence
  HTT spacer sequence GTCN PAM
caacuuuuaagugaaacggg

SEQ ID NO: 25417 - RNA, 20 nt, Artificial Sequence
  HTT spacer sequence GTCN PAM
cuauauuuuuguuauuagaa

SEQ ID NO: 25418 - RNA, 20 nt, Artificial Sequence
  HTT spacer sequence GTCN PAM
guuaugcuugguaguagguu

SEQ ID NO: 25419 - RNA, 20 nt, Artificial Sequence
  HTT spacer sequence GTCN PAM
cuauggaaaauaaccuuuca

SEQ ID NO: 25420 - RNA, 20 nt, Artificial Sequence
  HTT spacer sequence GTCN PAM
cuuucuugaucggucuuacu

SEQ ID NO: 25421 - RNA, 20 nt, Artificial Sequence
  HTT spacer sequence GTCN PAM
uacugacauuguaauaguuu

SEQ ID NO: 25422 - RNA, 20 nt, Artificial Sequence
  HTT spacer sequence GTCN PAM
guaagaccgaucaagaaaga

SEQ ID NO: 25423 - RNA, 20 nt, Artificial Sequence
  HTT spacer sequence GTCN PAM
ucuuacggugaggugcuugu

SEQ ID NO: 25424 - RNA, 20 nt, Artificial Sequence
  HTT spacer sequence GTCN PAM
uacagcucuuacuuauccau

SEQ ID NO: 25425 - RNA, 20 nt, Artificial Sequence
  HTT spacer sequence GTCN PAM
uuuacauuccuggaguaagc

SEQ ID NO: 25426 - RNA, 20 nt, Artificial Sequence
  HTT spacer sequence GTCN PAM
uccuaaauuggcugaauuuu

SEQ ID NO: 25427 - RNA, 20 nt, Artificial Sequence
  HTT spacer sequence GTCN PAM
ggagucggauaccagccugg

SEQ ID NO: 25428 - RNA, 20 nt, Artificial Sequence
  HTT spacer sequence GTCN PAM
gauaccagccuggccaacgu

SEQ ID NO: 25429 - RNA, 20 nt, Artificial Sequence
  HTT spacer sequence GTCN PAM
agccacugcacuccagccug

SEQ ID NO: 25430 - RNA, 20 nt, Artificial Sequence
  HTT spacer sequence GTCN PAM
cgcucuauugcacaggcugg

SEQ ID NO: 25431 - RNA, 20 nt, Artificial Sequence
  HTT spacer sequence GTCN PAM
caaaaaaaaaaaaaaaaaaa

SEQ ID NO: 25432 - RNA, 20 nt, Artificial Sequence
  HTT spacer sequence GTCN PAM
ccugcauugguaauguauca

SEQ ID NO: 25433 - RNA, 20 nt, Artificial Sequence
  HTT spacer sequence GTCN PAM
agauuauaauuaacucagug

SEQ ID NO: 25434 - RNA, 20 nt, Artificial Sequence
  HTT spacer sequence GTCN PAM
cugaguuaauuauaaucuag

SEQ ID NO: 25435 - RNA, 20 nt, Artificial Sequence
  HTT spacer sequence GTCN PAM
caaaaaaaaaauaauaaaau

SEQ ID NO: 25436 - RNA, 20 nt, Artificial Sequence
  HTT spacer sequence GTCN PAM
cuacuaaaaauacaaaauua

SEQ ID NO: 25437 - RNA, 20 nt, Artificial Sequence
  HTT spacer sequence GTCN PAM
ggcuggucucaaacucccaa

SEQ ID NO: 25438 - RNA, 20 nt, Artificial Sequence
  HTT spacer sequence GTCN PAM
caaacucccaaccucaggug

SEQ ID NO: 25439 - RNA, 20 nt, Artificial Sequence
  HTT spacer sequence GTCN PAM
aggagggcggaucaccugag

SEQ ID NO: 25440 - RNA, 20 nt, Artificial Sequence
  HTT spacer sequence GTCN PAM
gcaacauaaauucuuauuau

SEQ ID NO: 25441 - RNA, 20 nt, Artificial Sequence
  HTT spacer sequence GTCN PAM
gauuucaguuaagaaaaaua

SEQ ID NO: 25442 - RNA, 20 nt, Artificial Sequence
  HTT spacer sequence GTCN PAM
ccagcaaauuaacauuacuu

SEQ ID NO: 25443 - RNA, 20 nt, Artificial Sequence
  HTT spacer sequence GTCN PAM
ggcuggucucgaacuccuga

SEQ ID NO: 25444 - RNA, 20 nt, Artificial Sequence
  HTT spacer sequence GTCN PAM
cgaacuccugaccucgugau

SEQ ID NO: 25445 - RNA, 20 nt, Artificial Sequence
  HTT spacer sequence GTCN PAM
ggaguucgagaccagccuga

SEQ ID NO: 25446 - RNA, 20 nt, Artificial Sequence
  HTT spacer sequence GTCN PAM
ggcugggcgcaguagcucac

SEQ ID NO: 25447 - RNA, 20 nt, Artificial Sequence
  HTT spacer sequence GTCN PAM
aauaaaauaaaaaggucugg

SEQ ID NO: 25448 - RNA, 20 nt, Artificial Sequence
  HTT spacer sequence GTCN PAM
ucuauaacauggaaguauuu

SEQ ID NO: 25449 - RNA, 20 nt, Artificial Sequence
  HTT spacer sequence GTCN PAM
gcaguauggucuucccuuga

SEQ ID NO: 25450 - RNA, 20 nt, Artificial Sequence
  HTT spacer sequence GTCN PAM
ucccuugauuuguucaaaau

SEQ ID NO: 25451 - RNA, 20 nt, Artificial Sequence
  HTT spacer sequence GTCN PAM
gccacaauaaaaauaaauaa

SEQ ID NO: 25452 - RNA, 20 nt, Artificial Sequence
  HTT spacer sequence GTCN PAM
ggcacuguuguaggcuuggg

SEQ ID NO: 25453 - RNA, 20 nt, Artificial Sequence
  HTT spacer sequence GTCN PAM
gggagacgaugugguaagcu

SEQ ID NO: 25454 - RNA, 20 nt, Artificial Sequence
  HTT spacer sequence GTCN PAM
cccugaccagccugcagaaa

SEQ ID NO: 25455 - RNA, 20 nt, Artificial Sequence
  HTT spacer sequence GTCN PAM
aaaguaggaaguuguaccau

SEQ ID NO: 25456 - RNA, 20 nt, Artificial Sequence
  HTT spacer sequence GTCN PAM
caccaugguacaacuuccua

SEQ ID NO: 25457 - RNA, 20 nt, Artificial Sequence
  HTT spacer sequence GTCN PAM
ucuuuccacugccuucccag

SEQ ID NO: 25458 - RNA, 20 nt, Artificial Sequence
  HTT spacer sequence GTCN PAM
acaacaguaugacauaaaca

SEQ ID NO: 25459 - RNA, 20 nt, Artificial Sequence
  HTT spacer sequence GTCN PAM
uacuguuguagacaacuauu

SEQ ID NO: 25460 - RNA, 20 nt, Artificial Sequence
  HTT spacer sequence GTCN PAM
uuuaucaauuuggcuuuuug

SEQ ID NO: 25461 - RNA, 20 nt, Artificial Sequence
  HTT spacer sequence GTCN PAM
cacacagcuaauauagcaga

SEQ ID NO: 25462 - RNA, 20 nt, Artificial Sequence
  HTT spacer sequence GTCN PAM
cuagucucacacagcuaaua

SEQ ID NO: 25463 - RNA, 20 nt, Artificial Sequence
  HTT spacer sequence GTCN PAM
ucaaguucauuuaagggaau

SEQ ID NO: 25464 - RNA, 20 nt, Artificial Sequence
  HTT spacer sequence GTCN PAM
agcuaaugagaaaagccuuu

SEQ ID NO: 25465 - RNA, 20 nt, Artificial Sequence
  HTT spacer sequence GTCN PAM
caauuaagugaaaaaagguu

SEQ ID NO: 25466 - RNA, 20 nt, Artificial Sequence
  HTT spacer sequence GTCN PAM
ucuccagcauucaggaauag

SEQ ID NO: 25467 - RNA, 20 nt, Artificial Sequence
  HTT spacer sequence GTCN PAM
ccaaaaucauucucaguaau

SEQ ID NO: 25468 - RNA, 20 nt, Artificial Sequence
  HTT spacer sequence GTCN PAM
gcaaaugaccaacugauauu

SEQ ID NO: 25469 - RNA, 20 nt, Artificial Sequence
  HTT spacer sequence GTCN PAM
uuugcugacacacacaagaa

SEQ ID NO: 25470 - RNA, 20 nt, Artificial Sequence
  HTT spacer sequence GTCN PAM
guaugugaggaaggugggaa

SEQ ID NO: 25471 - RNA, 20 nt, Artificial Sequence
  HTT spacer sequence GTCN PAM
ggcacuagacuucacuucug

SEQ ID NO: 25472 - RNA, 20 nt, Artificial Sequence
  HTT spacer sequence GTCN PAM
agugccagaccuaugauuag

SEQ ID NO: 25473 - RNA, 20 nt, Artificial Sequence
  HTT spacer sequence GTCN PAM
acccauauuuucuuuuuuau

SEQ ID NO: 25474 - RNA, 20 nt, Artificial Sequence
  HTT spacer sequence GTCN PAM
gcaccucaggugguuggagu

SEQ ID NO: 25475 - RNA, 20 nt, Artificial Sequence
  HTT spacer sequence GTCN PAM
aacuaccaagcauugaacuc

SEQ ID NO: 25476 - RNA, 20 nt, Artificial Sequence
  HTT spacer sequence GTCN PAM
uuucuaggggauugagcccu

SEQ ID NO: 25477 - RNA, 20 nt, Artificial Sequence
  HTT spacer sequence GTCN PAM
ugcuuauuugagguugcaau

SEQ ID NO: 25478 - RNA, 20 nt, Artificial Sequence
  HTT spacer sequence GTCN PAM
uucaauaacuuuuacuacaa

SEQ ID NO: 25479 - RNA, 20 nt, Artificial Sequence
  HTT spacer sequence GTCN PAM
gaccugccccauuguguauc

SEQ ID NO: 25480 - RNA, 20 nt, Artificial Sequence
  HTT spacer sequence GTCN PAM
gacgugguuaguuuuccuga

SEQ ID NO: 25481 - RNA, 20 nt, Artificial Sequence
  HTT spacer sequence GTCN PAM
ggguagcugucucaucucca

SEQ ID NO: 25482 - RNA, 20 nt, Artificial Sequence
  HTT spacer sequence GTCN PAM
caucuccaguucagcagaac

SEQ ID NO: 25483 - RNA, 20 nt, Artificial Sequence
  HTT spacer sequence GTCN PAM
uaugcccuaguaaaagcauu

SEQ ID NO: 25484 - RNA, 20 nt, Artificial Sequence
  HTT spacer sequence GTCN PAM
aaugaaggaaugcuuuuacu

SEQ ID NO: 25485 - RNA, 20 nt, Artificial Sequence
  HTT spacer sequence GTCN PAM
caauacauuuuauaccagcu

SEQ ID NO: 25486 - RNA, 20 nt, Artificial Sequence
  HTT spacer sequence GTCN PAM
uccuuucucuugcaauucca

SEQ ID NO: 25487 - RNA, 20 nt, Artificial Sequence
  HTT spacer sequence GTCN PAM
auaauuugacuuugcaaaug

SEQ ID NO: 25488 - RNA, 20 nt, Artificial Sequence
  HTT spacer sequence GTCN PAM
aauuauagacaauuuuuaag

SEQ ID NO: 25489 - RNA, 20 nt, Artificial Sequence
  HTT spacer sequence GTCN PAM
gcuuccagagugccuccacu

SEQ ID NO: 25490 - RNA, 20 nt, Artificial Sequence
  HTT spacer sequence GTCN PAM
aggaagagcuguaccguugg

SEQ ID NO: 25491 - RNA, 20 nt, Artificial Sequence
  HTT spacer sequence GTCN PAM
gaaucauuguggccauccca

SEQ ID NO: 25492 - RNA, 20 nt, Artificial Sequence
  HTT spacer sequence GTCN PAM
gcuugguucccauuggaucu

SEQ ID NO: 25493 - RNA, 20 nt, Artificial Sequence
  HTT spacer sequence GTCN PAM
cuguuucaacucaguaccag

SEQ ID NO: 25494 - RNA, 20 nt, Artificial Sequence
  HTT spacer sequence GTCN PAM
uggagucccuguuucaacuc

SEQ ID NO: 25495 - RNA, 20 nt, Artificial Sequence
  HTT spacer sequence GTCN PAM
uugccagugauggcuugucc

SEQ ID NO: 25496 - RNA, 20 nt, Artificial Sequence
  HTT spacer sequence GTCN PAM
cuuuagucaaauuucagaug

SEQ ID NO: 25497 - RNA, 20 nt, Artificial Sequence
  HTT spacer sequence GTCN PAM
aauuucagauguuaccuaua

SEQ ID NO: 25498 - RNA, 20 nt, Artificial Sequence
  HTT spacer sequence GTCN PAM
auacauuauacuuucuuaac

SEQ ID NO: 25499 - RNA, 20 nt, Artificial Sequence
  HTT spacer sequence GTCN PAM
cacagaguggcccuaaucac

SEQ ID NO: 25500 - RNA, 20 nt, Artificial Sequence
  HTT spacer sequence GTCN PAM
uccuugcuggccacauccuc

SEQ ID NO: 25501 - RNA, 20 nt, Artificial Sequence
  HTT spacer sequence GTCN PAM
auugaaauugauuuugggag

SEQ ID NO: 25502 - RNA, 20 nt, Artificial Sequence
  HTT spacer sequence GTCN PAM
cuuucacgaaacucuccuau

SEQ ID NO: 25503 - RNA, 20 nt, Artificial Sequence
  HTT spacer sequence GTCN PAM
cccuaccuucuccuccagcc

SEQ ID NO: 25504 - RNA, 20 nt, Artificial Sequence
  HTT spacer sequence GTCN PAM
caaagccauuaucuugccuu

SEQ ID NO: 25505 - RNA, 20 nt, Artificial Sequence
  HTT spacer sequence GTCN PAM
ucccuacagucccaaagcca

SEQ ID NO: 25506 - RNA, 20 nt, Artificial Sequence
  HTT spacer sequence GTCN PAM
ucacaaccgaaguucaguug

SEQ ID NO: 25507 - RNA, 20 nt, Artificial Sequence
  HTT spacer sequence GTCN PAM
ucccagguuucuuugucuuc

SEQ ID NO: 25508 - RNA, 20 nt, Artificial Sequence
  HTT spacer sequence GTCN PAM
ccaccacacaccugcccagg

SEQ ID NO: 25509 - RNA, 20 nt, Artificial Sequence
  HTT spacer sequence GTCN PAM
uggaaauugggaacacagau

SEQ ID NO: 25510 - RNA, 20 nt, Artificial Sequence
  HTT spacer sequence GTCN PAM
ggccaacucucaacauaggg

SEQ ID NO: 25511 - RNA, 20 nt, Artificial Sequence
  HTT spacer sequence GTCN PAM
uaaaugacuucaguucccca

SEQ ID NO: 25512 - RNA, 20 nt, Artificial Sequence
  HTT spacer sequence GTCN PAM
uuuaagacccuauguugaga

SEQ ID NO: 25513 - RNA, 20 nt, Artificial Sequence
  HTT spacer sequence GTCN PAM
uucccaugcuauuggggugg

SEQ ID NO: 25514 - RNA, 20 nt, Artificial Sequence
  HTT spacer sequence GTCN PAM
gugcccauaucacagccagu

SEQ ID NO: 25515 - RNA, 20 nt, Artificial Sequence
  HTT spacer sequence GTCN PAM
ggccagcccugggggaccgg

SEQ ID NO: 25516 - RNA, 20 nt, Artificial Sequence
  HTT spacer sequence GTCN PAM
cccagggcuggccagaccuc

SEQ ID NO: 25517 - RNA, 20 nt, Artificial Sequence
  HTT spacer sequence GTCN PAM
uggaugacguggcuccugga

SEQ ID NO: 25518 - RNA, 20 nt, Artificial Sequence
  HTT spacer sequence GTCN PAM
uccaggacgugggcacaaau

SEQ ID NO: 25519 - RNA, 20 nt, Artificial Sequence
  HTT spacer sequence GTCN PAM
aggagccacgucauccagga

SEQ ID NO: 25520 - RNA, 20 nt, Artificial Sequence
  HTT spacer sequence GTCN PAM
cacuugggugcuggauucau

SEQ ID NO: 25521 - RNA, 20 nt, Artificial Sequence
  HTT spacer sequence GTCN PAM
uuaaggcuguaugaauccag

SEQ ID NO: 25522 - RNA, 20 nt, Artificial Sequence
  HTT spacer sequence GTCN PAM
ggaaacccauagucauuaag

SEQ ID NO: 25523 - RNA, 20 nt, Artificial Sequence
  HTT spacer sequence GTCN PAM
cuucuuuauucucuuuuugc

SEQ ID NO: 25524 - RNA, 20 nt, Artificial Sequence
  HTT spacer sequence GTCN PAM
caaucugagcaauuuuguuc

SEQ ID NO: 25525 - RNA, 20 nt, Artificial Sequence
  HTT spacer sequence GTCN PAM
cauuuugauguuaaauuuag

SEQ ID NO: 25526 - RNA, 20 nt, Artificial Sequence
  HTT spacer sequence GTCN PAM
cccaaagugcuggaauaaca

SEQ ID NO: 25527 - RNA, 20 nt, Artificial Sequence
  HTT spacer sequence GTCN PAM
cgaacucuuggccucaagug

SEQ ID NO: 25528 - RNA, 20 nt, Artificial Sequence
  HTT spacer sequence GTCN PAM
agagaucaagaccauccugg

SEQ ID NO: 25529 - RNA, 20 nt, Artificial Sequence
  HTT spacer sequence GTCN PAM
ugaucucuugaccucgugau

SEQ ID NO: 25530 - RNA, 20 nt, Artificial Sequence
  HTT spacer sequence GTCN PAM
cuacuaaaaauacaaaaaaa

SEQ ID NO: 25531 - RNA, 20 nt, Artificial Sequence
  HTT spacer sequence GTCN PAM
cagcugcucgggaggcugag

SEQ ID NO: 25532 - RNA, 20 nt, Artificial Sequence
  HTT spacer sequence GTCN PAM
cccaggcuggagugcagugg

SEQ ID NO: 25533 - RNA, 20 nt, Artificial Sequence
  HTT spacer sequence GTCN PAM
cgcucugucacccaggcugg

SEQ ID NO: 25534 - RNA, 20 nt, Artificial Sequence
  HTT spacer sequence GTCN PAM
caaaaaaaaaauuagauggg

SEQ ID NO: 25535 - RNA, 20 nt, Artificial Sequence
  HTT spacer sequence GTCN PAM
cccaggcuggagugcagcgg

SEQ ID NO: 25536 - RNA, 20 nt, Artificial Sequence
  HTT spacer sequence GTCN PAM
gacucuuuccaaaagaagaa

SEQ ID NO: 25537 - RNA, 20 nt, Artificial Sequence
  HTT spacer sequence GTCN PAM
gacucugucacccaggcugg

SEQ ID NO: 25538 - RNA, 20 nt, Artificial Sequence
  HTT spacer sequence GTCN PAM
cauuuuuuucuucuuuugga

SEQ ID NO: 25539 - RNA, 20 nt, Artificial Sequence
  HTT spacer sequence GTCN PAM
cuguuaucccuaagagggaa

SEQ ID NO: 25540 - RNA, 20 nt, Artificial Sequence
  HTT spacer sequence GTCN PAM
ccuuaaaucuugguuaaugg

SEQ ID NO: 25541 - RNA, 20 nt, Artificial Sequence
  HTT spacer sequence GTCN PAM
uggcuagcauaguuauggag

SEQ ID NO: 25542 - RNA, 20 nt, Artificial Sequence
  HTT spacer sequence GTCN PAM
cugagauuggcagaacauuc

SEQ ID NO: 25543 - RNA, 20 nt, Artificial Sequence
  HTT spacer sequence GTCN PAM
aucuuaaauccauuguacaa

SEQ ID NO: 25544 - RNA, 20 nt, Artificial Sequence
  HTT spacer sequence GTCN PAM
cuacuaaaacuacaaaaaaa

SEQ ID NO: 25545 - RNA, 20 nt, Artificial Sequence
  HTT spacer sequence GTCN PAM
gguuggucucaaacuccuga

SEQ ID NO: 25546 - RNA, 20 nt, Artificial Sequence
  HTT spacer sequence GTCN PAM
caaacuccugaccugaagug

SEQ ID NO: 25547 - RNA, 20 nt, Artificial Sequence
  HTT spacer sequence GTCN PAM
ggaguuugagaccaaccuga

SEQ ID NO: 25548 - RNA, 20 nt, Artificial Sequence
  HTT spacer sequence GTCN PAM
aucuuaggcugggcguggug

SEQ ID NO: 25549 - RNA, 20 nt, Artificial Sequence
  HTT spacer sequence GTCN PAM
ucuaccuuuaaaaaucuccc

SEQ ID NO: 25550 - RNA, 20 nt, Artificial Sequence
  HTT spacer sequence GTCN PAM
ucucccuucucugcaaacau

SEQ ID NO: 25551 - RNA, 20 nt, Artificial Sequence
  HTT spacer sequence GTCN PAM
cagccucagcccacagagcu

SEQ ID NO: 25552 - RNA, 20 nt, Artificial Sequence
  HTT spacer sequence GTCN PAM
accucagagcagugggaagc

SEQ ID NO: 25553 - RNA, 20 nt, Artificial Sequence
  HTT spacer sequence GTCN PAM
aggccaagagagccaaagaa

SEQ ID NO: 25554 - RNA, 20 nt, Artificial Sequence
  HTT spacer sequence GTCN PAM
acuacuucagccauccuucc

SEQ ID NO: 25555 - RNA, 20 nt, Artificial Sequence
  HTT spacer sequence GTCN PAM
uuacaucucugggcacugcu

SEQ ID NO: 25556 - RNA, 20 nt, Artificial Sequence
  HTT spacer sequence GTCN PAM
ugccugccuuucccucuuug

SEQ ID NO: 25557 - RNA, 20 nt, Artificial Sequence
  HTT spacer sequence GTCN PAM
ucuucaguuggcuuucagag

SEQ ID NO: 25558 - RNA, 20 nt, Artificial Sequence
  HTT spacer sequence GTCN PAM
cuggguucaguccuuccugc

SEQ ID NO: 25559 - RNA, 20 nt, Artificial Sequence
  HTT spacer sequence GTCN PAM
uuccugcccaccagcacaug

SEQ ID NO: 25560 - RNA, 20 nt, Artificial Sequence
  HTT spacer sequence GTCN PAM
uaggccgucuucucucuuug

SEQ ID NO: 25561 - RNA, 20 nt, Artificial Sequence
  HTT spacer sequence GTCN PAM
ucucucuuuguagucucugg

SEQ ID NO: 25562 - RNA, 20 nt, Artificial Sequence
  HTT spacer sequence GTCN PAM
cugggccagugcuguucuag

SEQ ID NO: 25563 - RNA, 20 nt, Artificial Sequence
  HTT spacer sequence GTCN PAM
ugccuggcauagcuauggag

SEQ ID NO: 25564 - RNA, 20 nt, Artificial Sequence
  HTT spacer sequence GTCN PAM
cacuagcugcauuucaaggg

SEQ ID NO: 25565 - RNA, 20 nt, Artificial Sequence
  HTT spacer sequence GTCN PAM
gggcuguucuccugucuuca

SEQ ID NO: 25566 - RNA, 20 nt, Artificial Sequence
  HTT spacer sequence GTCN PAM
ucagugucuagaugagggac

SEQ ID NO: 25567 - RNA, 20 nt, Artificial Sequence
  HTT spacer sequence GTCN PAM
agaugagggaccucagagga

SEQ ID NO: 25568 - RNA, 20 nt, Artificial Sequence
  HTT spacer sequence GTCN PAM
cucaucuagacacugaagac

SEQ ID NO: 25569 - RNA, 20 nt, Artificial Sequence
  HTT spacer sequence GTCN PAM
ucugaggucccucaucuaga

SEQ ID NO: 25570 - RNA, 20 nt, Artificial Sequence
  HTT spacer sequence GTCN PAM
cuggagcugcaguucaaugu

SEQ ID NO: 25571 - RNA, 20 nt, Artificial Sequence
  HTT spacer sequence GTCN PAM
cggggcagcuggcuacauug

SEQ ID NO: 25572 - RNA, 20 nt, Artificial Sequence
  HTT spacer sequence GTCN PAM
gacacggugugaugagcuca

SEQ ID NO: 25573 - RNA, 20 nt, Artificial Sequence
  HTT spacer sequence GTCN PAM
gacauauccacaaaucagcu

SEQ ID NO: 25574 - RNA, 20 nt, Artificial Sequence
  HTT spacer sequence GTCN PAM
uccuccccacaucugccccu

SEQ ID NO: 25575 - RNA, 20 nt, Artificial Sequence
  HTT spacer sequence GTCN PAM
uaucaagcuagaaacagguc

SEQ ID NO: 25576 - RNA, 20 nt, Artificial Sequence
  HTT spacer sequence GTCN PAM
ccacaagucuucauuuccac

SEQ ID NO: 25577 - RNA, 20 nt, Artificial Sequence
  HTT spacer sequence GTCN PAM
ucauuuccacucaccaaguc

SEQ ID NO: 25578 - RNA, 20 nt, Artificial Sequence
  HTT spacer sequence GTCN PAM
uuuguuuccccuacuaaaua

SEQ ID NO: 25579 - RNA, 20 nt, Artificial Sequence
  HTT spacer sequence GTCN PAM
ccaaccucuguuaaaaaccg

SEQ ID NO: 25580 - RNA, 20 nt, Artificial Sequence
  HTT spacer sequence GTCN PAM
gguuuuuaacagagguuggg

SEQ ID NO: 25581 - RNA, 20 nt, Artificial Sequence
  HTT spacer sequence GTCN PAM
cggccucccaaaguucugga

SEQ ID NO: 25582 - RNA, 20 nt, Artificial Sequence
  HTT spacer sequence GTCN PAM
ggagaucgagaccauuccgg

SEQ ID NO: 25583 - RNA, 20 nt, Artificial Sequence
  HTT spacer sequence GTCN PAM
cgaucuccugaccuugugau

SEQ ID NO: 25584 - RNA, 20 nt, Artificial Sequence
  HTT spacer sequence GTCN PAM
cuacuaaaaauacaaaaaaa

SEQ ID NO: 25585 - RNA, 20 nt, Artificial Sequence
  HTT spacer sequence GTCN PAM
cagcuaccugggaggcugau

SEQ ID NO: 25586 - RNA, 20 nt, Artificial Sequence
  HTT spacer sequence GTCN PAM
cccaggcuggagugcaaugg

SEQ ID NO: 25587 - RNA, 20 nt, Artificial Sequence
  HTT spacer sequence GTCN PAM
cgcucugucgcccaggcugg

SEQ ID NO: 25588 - RNA, 20 nt, Artificial Sequence
  HTT spacer sequence GTCN PAM
caaaaacaaaacaaaacaaa

SEQ ID NO: 25589 - RNA, 20 nt, Artificial Sequence
  HTT spacer sequence GTCN PAM
uuacagaagugugagaacga

SEQ ID NO: 25590 - RNA, 20 nt, Artificial Sequence
  HTT spacer sequence GTCN PAM
cagguaugucuuuacagaag

SEQ ID NO: 25591 - RNA, 20 nt, Artificial Sequence
  HTT spacer sequence GTCN PAM
uggcagaaggugaaggggaa

SEQ ID NO: 25592 - RNA, 20 nt, Artificial Sequence
  HTT spacer sequence GTCN PAM
cucucucucucuccuucucu

SEQ ID NO: 25593 - RNA, 20 nt, Artificial Sequence
  HTT spacer sequence GTCN PAM
gagguggggccuggugggag

SEQ ID NO: 25594 - RNA, 20 nt, Artificial Sequence
  HTT spacer sequence GTCN PAM
ccacccaaaucucaugcuga

SEQ ID NO: 25595 - RNA, 20 nt, Artificial Sequence
  HTT spacer sequence GTCN PAM
uccacagaaccggucccugg

SEQ ID NO: 25596 - RNA, 20 nt, Artificial Sequence
  HTT spacer sequence GTCN PAM
cuggugccaaaaaguuuggg

SEQ ID NO: 25597 - RNA, 20 nt, Artificial Sequence
  HTT spacer sequence GTCN PAM
ccaaacuuuuuggcaccagg

SEQ ID NO: 25598 - RNA, 20 nt, Artificial Sequence
  HTT spacer sequence GTCN PAM
auguacaggugcaugcauau

SEQ ID NO: 25599 - RNA, 20 nt, Artificial Sequence
  HTT spacer sequence GTCN PAM
agacugauauacuaucucau

SEQ ID NO: 25600 - RNA, 20 nt, Artificial Sequence
  HTT spacer sequence GTCN PAM
ggaccagaaguggcagagaa

SEQ ID NO: 25601 - RNA, 20 nt, Artificial Sequence
  HTT spacer sequence GTCN PAM
uucuguugcccagcuuggag

SEQ ID NO: 25602 - RNA, 20 nt, Artificial Sequence
  HTT spacer sequence GTCN PAM
ugaucauagcucacugcggc

SEQ ID NO: 25603 - RNA, 20 nt, Artificial Sequence
  HTT spacer sequence GTCN PAM
caacuacugagaaggcugag

SEQ ID NO: 25604 - RNA, 20 nt, Artificial Sequence
  HTT spacer sequence GTCN PAM
caaaaaaaaaaaaaaaucaa

SEQ ID NO: 25605 - RNA, 20 nt, Artificial Sequence
  HTT spacer sequence GTCN PAM
cagccugucgcccaggcugg

SEQ ID NO: 25606 - RNA, 20 nt, Artificial Sequence
  HTT spacer sequence GTCN PAM
cccaggcuggaguggguugg

SEQ ID NO: 25607 - RNA, 20 nt, Artificial Sequence
  HTT spacer sequence GTCN PAM
cuacuaaaaauacaaaaagu

SEQ ID NO: 25608 - RNA, 20 nt, Artificial Sequence
  HTT spacer sequence GTCN PAM
cgaacuugugaccucgugau

SEQ ID NO: 25609 - RNA, 20 nt, Artificial Sequence
  HTT spacer sequence GTCN PAM
caaguucgagaccagccugg

SEQ ID NO: 25610 - RNA, 20 nt, Artificial Sequence
  HTT spacer sequence GTCN PAM
cugugacucuacgucuucug

SEQ ID NO: 25611 - RNA, 20 nt, Artificial Sequence
  HTT spacer sequence GTCN PAM
cagagacagaaggcagguua

SEQ ID NO: 25612 - RNA, 20 nt, Artificial Sequence
  HTT spacer sequence GTCN PAM
ucuggacauuacuguggaug

SEQ ID NO: 25613 - RNA, 20 nt, Artificial Sequence
  HTT spacer sequence GTCN PAM
agaagacguagagucacaga

SEQ ID NO: 25614 - RNA, 20 nt, Artificial Sequence
  HTT spacer sequence GTCN PAM
gugagcuugugacuggugcc

SEQ ID NO: 25615 - RNA, 20 nt, Artificial Sequence
  HTT spacer sequence GTCN PAM
caagcucacugacuguauga

SEQ ID NO: 25616 - RNA, 20 nt, Artificial Sequence
  HTT spacer sequence GTCN PAM
caauuuaaaaaaaaaagaaa

SEQ ID NO: 25617 - RNA, 20 nt, Artificial Sequence
  HTT spacer sequence GTCN PAM
cagccacucgggaggcugag

SEQ ID NO: 25618 - RNA, 20 nt, Artificial Sequence
  HTT spacer sequence GTCN PAM
ccaugccuggcuaauuuuuu

SEQ ID NO: 25619 - RNA, 20 nt, Artificial Sequence
  HTT spacer sequence GTCN PAM
cgaucuccugacuucaugau

SEQ ID NO: 25620 - RNA, 20 nt, Artificial Sequence
  HTT spacer sequence GTCN PAM
ggagaucgagaccacccugg

SEQ ID NO: 25621 - RNA, 20 nt, Artificial Sequence
  HTT spacer sequence GTCN PAM
gcauuucuucccugaugccu

SEQ ID NO: 25622 - RNA, 20 nt, Artificial Sequence
  HTT spacer sequence GTCN PAM
augcacccgauuguagccau

SEQ ID NO: 25623 - RNA, 20 nt, Artificial Sequence
  HTT spacer sequence GTCN PAM
ccuuaaaccauaauaggaug

SEQ ID NO: 25624 - RNA, 20 nt, Artificial Sequence
  HTT spacer sequence GTCN PAM
uagucagcauggguugccau

SEQ ID NO: 25625 - RNA, 20 nt, Artificial Sequence
  HTT spacer sequence GTCN PAM
gcauggguugccauaacaaa

SEQ ID NO: 25626 - RNA, 20 nt, Artificial Sequence
  HTT spacer sequence GTCN PAM
aagauccaggacuuucgccu

SEQ ID NO: 25627 - RNA, 20 nt, Artificial Sequence
  HTT spacer sequence GTCN PAM
uggaucuuggacuucccaac

SEQ ID NO: 25628 - RNA, 20 nt, Artificial Sequence
  HTT spacer sequence GTCN PAM
gcccucaugacccagucacc

SEQ ID NO: 25629 - RNA, 20 nt, Artificial Sequence
  HTT spacer sequence GTCN PAM
ugagggcagaccccucauga

SEQ ID NO: 25630 - RNA, 20 nt, Artificial Sequence
  HTT spacer sequence GTCN PAM
ccucccaaaggccccaccuc

SEQ ID NO: 25631 - RNA, 20 nt, Artificial Sequence
  HTT spacer sequence GTCN PAM
cccaaauuuauacacugaaa

SEQ ID NO: 25632 - RNA, 20 nt, Artificial Sequence
  HTT spacer sequence GTCN PAM
auagucccccaaauuuauac

SEQ ID NO: 25633 - RNA, 20 nt, Artificial Sequence
  HTT spacer sequence GTCN PAM
uagcucugcuacuuacucac

SEQ ID NO: 25634 - RNA, 20 nt, Artificial Sequence
  HTT spacer sequence GTCN PAM
gucaucuugccuucacucug

SEQ ID NO: 25635 - RNA, 20 nt, Artificial Sequence
  HTT spacer sequence GTCN PAM
ucuugccuucacucugcucc

SEQ ID NO: 25636 - RNA, 20 nt, Artificial Sequence
  HTT spacer sequence GTCN PAM
cgauguucuauaugcucuca

SEQ ID NO: 25637 - RNA, 20 nt, Artificial Sequence
  HTT spacer sequence GTCN PAM
acaaauccagauguauucau

SEQ ID NO: 25638 - RNA, 20 nt, Artificial Sequence
  HTT spacer sequence GTCN PAM
cagcugguuaccagcaaagc

SEQ ID NO: 25639 - RNA, 20 nt, Artificial Sequence
  HTT spacer sequence GTCN PAM
cgaacuccaagcuccaguga

SEQ ID NO: 25640 - RNA, 20 nt, Artificial Sequence
  HTT spacer sequence GTCN PAM
ccucaagaaauuaaaaaauu

SEQ ID NO: 25641 - RNA, 20 nt, Artificial Sequence
  HTT spacer sequence GTCN PAM
caucuacucuggaggcugag

SEQ ID NO: 25642 - RNA, 20 nt, Artificial Sequence
  HTT spacer sequence GTCN PAM
cccaggauggggugcaauca

SEQ ID NO: 25643 - RNA, 20 nt, Artificial Sequence
  HTT spacer sequence GTCN PAM
cacucgucacccaggauggg

SEQ ID NO: 25644 - RNA, 20 nt, Artificial Sequence
  HTT spacer sequence GTCN PAM
caaaaaagaaaaaaaaaaug

SEQ ID NO: 25645 - RNA, 20 nt, Artificial Sequence
  HTT spacer sequence GTCN PAM
uggcgucauggccaacauag

SEQ ID NO: 25646 - RNA, 20 nt, Artificial Sequence
  HTT spacer sequence GTCN PAM
uggccaacauagaaugcccu

SEQ ID NO: 25647 - RNA, 20 nt, Artificial Sequence
  HTT spacer sequence GTCN PAM
cuaccauguaucauugugug

SEQ ID NO: 25648 - RNA, 20 nt, Artificial Sequence
  HTT spacer sequence GTCN PAM
gaacuguacauaucaggguc

SEQ ID NO: 25649 - RNA, 20 nt, Artificial Sequence
  HTT spacer sequence GTCN PAM
aagaacaaaaugagugacau

SEQ ID NO: 25650 - RNA, 20 nt, Artificial Sequence
  HTT spacer sequence GTCN PAM
cucauuuuguucuuggaccc

SEQ ID NO: 25651 - RNA, 20 nt, Artificial Sequence
  HTT spacer sequence GTCN PAM
cauccgacgaaaggggaagg

SEQ ID NO: 25652 - RNA, 20 nt, Artificial Sequence
  HTT spacer sequence GTCN PAM
gaugggacuuagagaagggg

SEQ ID NO: 25653 - RNA, 20 nt, Artificial Sequence
  HTT spacer sequence GTCN PAM
caagaaaggcagugaggcca

SEQ ID NO: 25654 - RNA, 20 nt, Artificial Sequence
  HTT spacer sequence GTCN PAM
cucccuuccccacgcuguuu

SEQ ID NO: 25655 - RNA, 20 nt, Artificial Sequence
  HTT spacer sequence GTCN PAM
uguagaaacauaggauuuaa

SEQ ID NO: 25656 - RNA, 20 nt, Artificial Sequence
  HTT spacer sequence GTCN PAM
uuaguuucuaauaucuugaa

SEQ ID NO: 25657 - RNA, 20 nt, Artificial Sequence
  HTT spacer sequence GTCN PAM
guguacaucagucauuaguu

SEQ ID NO: 25658 - RNA, 20 nt, Artificial Sequence
  HTT spacer sequence GTCN PAM
gaagcauuucuaagugccac

SEQ ID NO: 25659 - RNA, 20 nt, Artificial Sequence
  HTT spacer sequence GTCN PAM
gccaguggcacuuagaaaug

SEQ ID NO: 25660 - RNA, 20 nt, Artificial Sequence
  HTT spacer sequence GTCN PAM
aaaauucugauuggaaaugg

SEQ ID NO: 25661 - RNA, 20 nt, Artificial Sequence
  HTT spacer sequence GTCN PAM
ucugaguuggaggagcuuaa

SEQ ID NO: 25662 - RNA, 20 nt, Artificial Sequence
  HTT spacer sequence GTCN PAM
uccaaacuugugaaugguuu

SEQ ID NO: 25663 - RNA, 20 nt, Artificial Sequence
  HTT spacer sequence GTCN PAM
gaacagaaggggcuaggauu

SEQ ID NO: 25664 - RNA, 20 nt, Artificial Sequence
  HTT spacer sequence GTCN PAM
caccuaaauccuagccccuu

SEQ ID NO: 25665 - RNA, 20 nt, Artificial Sequence
  HTT spacer sequence GTCN PAM
cuucaugcuuugccaggcuc

SEQ ID NO: 25666 - RNA, 20 nt, Artificial Sequence
  HTT spacer sequence GTCN PAM
cagauagcagaggcagcagc

SEQ ID NO: 25667 - RNA, 20 nt, Artificial Sequence
  HTT spacer sequence GTCN PAM
guacagucucccuccagacc

SEQ ID NO: 25668 - RNA, 20 nt, Artificial Sequence
  HTT spacer sequence GTCN PAM
cccuccagacccauucucac

SEQ ID NO: 25669 - RNA, 20 nt, Artificial Sequence
  HTT spacer sequence GTCN PAM
ggagggagacuguacagaca

SEQ ID NO: 25670 - RNA, 20 nt, Artificial Sequence
  HTT spacer sequence GTCN PAM
cuuggcacccaggggccagu

SEQ ID NO: 25671 - RNA, 20 nt, Artificial Sequence
  HTT spacer sequence GTCN PAM
caaaaaaauaaauaaauaaa

SEQ ID NO: 25672 - RNA, 20 nt, Artificial Sequence
  HTT spacer sequence GTCN PAM
cacucugucacccaggcugg

SEQ ID NO: 25673 - RNA, 20 nt, Artificial Sequence
  HTT spacer sequence GTCN PAM
cccaggcuggagugcagugg

SEQ ID NO: 25674 - RNA, 20 nt, Artificial Sequence
  HTT spacer sequence GTCN PAM
cagcuacucaggaggcugag

SEQ ID NO: 25675 - RNA, 20 nt, Artificial Sequence
  HTT spacer sequence GTCN PAM
ccacuaauaaaaaauacaaa

SEQ ID NO: 25676 - RNA, 20 nt, Artificial Sequence
  HTT spacer sequence GTCN PAM
ugaucuccugaccucgugau

SEQ ID NO: 25677 - RNA, 20 nt, Artificial Sequence
  HTT spacer sequence GTCN PAM
ggagaucaagaccauccugg

SEQ ID NO: 25678 - RNA, 20 nt, Artificial Sequence
  HTT spacer sequence GTCN PAM
accucagccucucaaagugc

SEQ ID NO: 25679 - RNA, 20 nt, Artificial Sequence
  HTT spacer sequence GTCN PAM
cuguacccggccuauuuauu

SEQ ID NO: 25680 - RNA, 20 nt, Artificial Sequence
  HTT spacer sequence GTCN PAM
auuaaaaauaaauaaauagg

SEQ ID NO: 25681 - RNA, 20 nt, Artificial Sequence
  HTT spacer sequence GTCN PAM
ggaguucaagaccaaacugg

SEQ ID NO: 25682 - RNA, 20 nt, Artificial Sequence
  HTT spacer sequence GTCN PAM
ugaacucccgaccucgugau

SEQ ID NO: 25683 - RNA, 20 nt, Artificial Sequence
  HTT spacer sequence GTCN PAM
cuacuaaaaauaccacaaaa

SEQ ID NO: 25684 - RNA, 20 nt, Artificial Sequence
  HTT spacer sequence GTCN PAM
ucccagcuacuugggaggcu

SEQ ID NO: 25685 - RNA, 20 nt, Artificial Sequence
  HTT spacer sequence GTCN PAM
cagcuacuugggaggcugag

SEQ ID NO: 25686 - RNA, 20 nt, Artificial Sequence
  HTT spacer sequence GTCN PAM
cgcucuaucgcccaggcuag

SEQ ID NO: 25687 - RNA, 20 nt, Artificial Sequence
  HTT spacer sequence GTCN PAM
caaaaaaaaaaaaaaaagaa

SEQ ID NO: 25688 - RNA, 20 nt, Artificial Sequence
  HTT spacer sequence GTCN PAM
ccaugcuauacaguagaucu

SEQ ID NO: 25689 - RNA, 20 nt, Artificial Sequence
  HTT spacer sequence GTCN PAM
auaaaugaaauuuuguaucc

SEQ ID NO: 25690 - RNA, 20 nt, Artificial Sequence
  HTT spacer sequence GTCN PAM
aggauacaaaauuucauuua

SEQ ID NO: 25691 - RNA, 20 nt, Artificial Sequence
  HTT spacer sequence GTCN PAM
ucuucacccaggcuggagua

SEQ ID NO: 25692 - RNA, 20 nt, Artificial Sequence
  HTT spacer sequence GTCN PAM
cgaacuccugaccucaagug

SEQ ID NO: 25693 - RNA, 20 nt, Artificial Sequence
  HTT spacer sequence GTCN PAM
ggaguucgagaccagccugg

SEQ ID NO: 25694 - RNA, 20 nt, Artificial Sequence
  HTT spacer sequence GTCN PAM
auccuuagaaaagagcaucu

SEQ ID NO: 25695 - RNA, 20 nt, Artificial Sequence
  HTT spacer sequence GTCN PAM
aucuuccuccuguacuacag

SEQ ID NO: 25696 - RNA, 20 nt, Artificial Sequence
  HTT spacer sequence GTCN PAM
uuaguuuauuuaauucauca

SEQ ID NO: 25697 - RNA, 20 nt, Artificial Sequence
  HTT spacer sequence GTCN PAM
aaagucuucaaacugaagua

SEQ ID NO: 25698 - RNA, 20 nt, Artificial Sequence
  HTT spacer sequence GTCN PAM
ucaaacugaaguagaauagu

SEQ ID NO: 25699 - RNA, 20 nt, Artificial Sequence
  HTT spacer sequence GTCN PAM
uuaaaacauuuuuacaucau

SEQ ID NO: 25700 - RNA, 20 nt, Artificial Sequence
  HTT spacer sequence GTCN PAM
uugaaucagcugcuccuaug

SEQ ID NO: 25701 - RNA, 20 nt, Artificial Sequence
  HTT spacer sequence GTCN PAM
auuucucauuacuucuaguu

SEQ ID NO: 25702 - RNA, 20 nt, Artificial Sequence
  HTT spacer sequence GTCN PAM
gaggaaauacuugaauauuu

SEQ ID NO: 25703 - RNA, 20 nt, Artificial Sequence
  HTT spacer sequence GTCN PAM
agaagcuuuaaaaauaugca

SEQ ID NO: 25704 - RNA, 20 nt, Artificial Sequence
  HTT spacer sequence GTCN PAM
uguuacaacaaguaaauccu

SEQ ID NO: 25705 - RNA, 20 nt, Artificial Sequence
  HTT spacer sequence GTCN PAM
ugaaagcuacacacgcuaac

SEQ ID NO: 25706 - RNA, 20 nt, Artificial Sequence
  HTT spacer sequence GTCN PAM
aauggauaguugauguuuuu

SEQ ID NO: 25707 - RNA, 20 nt, Artificial Sequence
  HTT spacer sequence GTCN PAM
uucagcuuuguuuaugauag

SEQ ID NO: 25708 - RNA, 20 nt, Artificial Sequence
  HTT spacer sequence GTCN PAM
cuguaaucaaucuuagcugu

SEQ ID NO: 25709 - RNA, 20 nt, Artificial Sequence
  HTT spacer sequence GTCN PAM
ggagggauccguguacaggc

SEQ ID NO: 25710 - RNA, 20 nt, Artificial Sequence
  HTT spacer sequence GTCN PAM
ugcagguacccucugccuaa

SEQ ID NO: 25711 - RNA, 20 nt, Artificial Sequence
  HTT spacer sequence GTCN PAM
ggaauuguggcucauguuag

SEQ ID NO: 25712 - RNA, 20 nt, Artificial Sequence
  HTT spacer sequence GTCN PAM
gggcauggugagccacuugu

SEQ ID NO: 25713 - RNA, 20 nt, Artificial Sequence
  HTT spacer sequence GTCN PAM
gcguaagaaacuguucacca

SEQ ID NO: 25714 - RNA, 20 nt, Artificial Sequence
  HTT spacer sequence GTCN PAM
agggauguuuuaguuuuuua

SEQ ID NO: 25715 - RNA, 20 nt, Artificial Sequence
  HTT spacer sequence GTCN PAM
aauuuaauuuuuguuuuugg

SEQ ID NO: 25716 - RNA, 20 nt, Artificial Sequence
  HTT spacer sequence GTCN PAM
ccaauaauguuuacagaaga

SEQ ID NO: 25717 - RNA, 20 nt, Artificial Sequence
  HTT spacer sequence GTCN PAM
gcucaucuauuagaagcauc

SEQ ID NO: 25718 - RNA, 20 nt, Artificial Sequence
  HTT spacer sequence GTCN PAM
aaaaaagaaaaaaaaaaaac

SEQ ID NO: 25719 - RNA, 20 nt, Artificial Sequence
  HTT spacer sequence GTCN PAM
ugcucuguccccagguugga

SEQ ID NO: 25720 - RNA, 20 nt, Artificial Sequence
  HTT spacer sequence GTCN PAM
ccagguuggagugcaguggu

SEQ ID NO: 25721 - RNA, 20 nt, Artificial Sequence
  HTT spacer sequence GTCN PAM
cagggcucaagugauccucc

SEQ ID NO: 25722 - RNA, 20 nt, Artificial Sequence
  HTT spacer sequence GTCN PAM
cagguacucaggagcugagg

SEQ ID NO: 25723 - RNA, 20 nt, Artificial Sequence
  HTT spacer sequence GTCN PAM
cuacaaaaaauguaaaaauu

SEQ ID NO: 25724 - RNA, 20 nt, Artificial Sequence
  HTT spacer sequence GTCN PAM
cccuaaguugccugggcugg

SEQ ID NO: 25725 - RNA, 20 nt, Artificial Sequence
  HTT spacer sequence GTCN PAM
caagcuccuggcuuaaguaa

SEQ ID NO: 25726 - RNA, 20 nt, Artificial Sequence
  HTT spacer sequence GTCN PAM
cccuguccagaaugugggau

SEQ ID NO: 25727 - RNA, 20 nt, Artificial Sequence
  HTT spacer sequence GTCN PAM
agaaugugggaugcuuuccu

SEQ ID NO: 25728 - RNA, 20 nt, Artificial Sequence
  HTT spacer sequence GTCN PAM
ucauauuuuacaagguuuga

SEQ ID NO: 25729 - RNA, 20 nt, Artificial Sequence
  HTT spacer sequence GTCN PAM
cuuuaagcugcaugguucuc

SEQ ID NO: 25730 - RNA, 20 nt, Artificial Sequence
  HTT spacer sequence GTCN PAM
gcucccaaagcagaagacgg

SEQ ID NO: 25731 - RNA, 20 nt, Artificial Sequence
  HTT spacer sequence GTCN PAM
ucugcuuugggagcugacau

SEQ ID NO: 25732 - RNA, 20 nt, Artificial Sequence
  HTT spacer sequence GTCN PAM
aagaugccagggaggccaga

SEQ ID NO: 25733 - RNA, 20 nt, Artificial Sequence
  HTT spacer sequence GTCN PAM
uccccgcggucagcuccugc

SEQ ID NO: 25734 - RNA, 20 nt, Artificial Sequence
  HTT spacer sequence GTCN PAM
gcuccugcugcgcagcuucu

SEQ ID NO: 25735 - RNA, 20 nt, Artificial Sequence
  HTT spacer sequence GTCN PAM
ugcuggaucuuugaguauug

SEQ ID NO: 25736 - RNA, 20 nt, Artificial Sequence
  HTT spacer sequence GTCN PAM
ccacuccccauuucuugugu

SEQ ID NO: 25737 - RNA, 20 nt, Artificial Sequence
  HTT spacer sequence GTCN PAM
ucccugguuucuugcuuugg

SEQ ID NO: 25738 - RNA, 20 nt, Artificial Sequence
  HTT spacer sequence GTCN PAM
ccacagaacuuuugcagcuc

SEQ ID NO: 25739 - RNA, 20 nt, Artificial Sequence
  HTT spacer sequence GTCN PAM
ucagaagagcugcaaaaguu

SEQ ID NO: 25740 - RNA, 20 nt, Artificial Sequence
  HTT spacer sequence GTCN PAM
ugagaugagaauuaagauga

SEQ ID NO: 25741 - RNA, 20 nt, Artificial Sequence
  HTT spacer sequence GTCN PAM
aggagaggucagauugcugu

SEQ ID NO: 25742 - RNA, 20 nt, Artificial Sequence
  HTT spacer sequence GTCN PAM
gauugcugugcauauuggag

SEQ ID NO: 25743 - RNA, 20 nt, Artificial Sequence
  HTT spacer sequence GTCN PAM
ugugagaugaagagcccagg

SEQ ID NO: 25744 - RNA, 20 nt, Artificial Sequence
  HTT spacer sequence GTCN PAM
aaggaacgaggugauguggu

SEQ ID NO: 25745 - RNA, 20 nt, Artificial Sequence
  HTT spacer sequence GTCN PAM
cugcuggauuuuucuuuccu

SEQ ID NO: 25746 - RNA, 20 nt, Artificial Sequence
  HTT spacer sequence GTCN PAM
accugggugugcccuaaggc

SEQ ID NO: 25747 - RNA, 20 nt, Artificial Sequence
  HTT spacer sequence GTCN PAM
ugguauuuagauccacucac

SEQ ID NO: 25748 - RNA, 20 nt, Artificial Sequence
  HTT spacer sequence GTCN PAM
gucucuugccugcuucugac

SEQ ID NO: 25749 - RNA, 20 nt, Artificial Sequence
  HTT spacer sequence GTCN PAM
cuugccugcuucugacuucg

SEQ ID NO: 25750 - RNA, 20 nt, Artificial Sequence
  HTT spacer sequence GTCN PAM
gaagcaggcaagagacagac

SEQ ID NO: 25751 - RNA, 20 nt, Artificial Sequence
  HTT spacer sequence GTCN PAM
gucucgccuuaccuuucuug

SEQ ID NO: 25752 - RNA, 20 nt, Artificial Sequence
  HTT spacer sequence GTCN PAM
cgccuuaccuuucuuguuau

SEQ ID NO: 25753 - RNA, 20 nt, Artificial Sequence
  HTT spacer sequence GTCN PAM
uugguccugacccauucucu

SEQ ID NO: 25754 - RNA, 20 nt, Artificial Sequence
  HTT spacer sequence GTCN PAM
ugacccauucucugagucug

SEQ ID NO: 25755 - RNA, 20 nt, Artificial Sequence
  HTT spacer sequence GTCN PAM
ggaccaaagacaugcauaac

SEQ ID NO: 25756 - RNA, 20 nt, Artificial Sequence
  HTT spacer sequence GTCN PAM
guaaaauagaauugcuguau

SEQ ID NO: 25757 - RNA, 20 nt, Artificial Sequence
  HTT spacer sequence GTCN PAM
aauucacauaggguugguuc

SEQ ID NO: 25758 - RNA, 20 nt, Artificial Sequence
  HTT spacer sequence GTCN PAM
uauuccuuauacacuaggau

SEQ ID NO: 25759 - RNA, 20 nt, Artificial Sequence
  HTT spacer sequence GTCN PAM
aucauaaucaguaucuggua

SEQ ID NO: 25760 - RNA, 20 nt, Artificial Sequence
  HTT spacer sequence GTCN PAM
gcacuggaaaaauauuuugg

SEQ ID NO: 25761 - RNA, 20 nt, Artificial Sequence
  HTT spacer sequence GTCN PAM
gcguguuuguugucagcacu

SEQ ID NO: 25762 - RNA, 20 nt, Artificial Sequence
  HTT spacer sequence GTCN PAM
auguuugugucuuugguugu

SEQ ID NO: 25763 - RNA, 20 nt, Artificial Sequence
  HTT spacer sequence GTCN PAM
uugguuguacauuaugagau

SEQ ID NO: 25764 - RNA, 20 nt, Artificial Sequence
  HTT spacer sequence GTCN PAM
cgaucucauaauguacaacc

SEQ ID NO: 25765 - RNA, 20 nt, Artificial Sequence
  HTT spacer sequence GTCN PAM
cgcuggaucuucagaacagc

SEQ ID NO: 25766 - RNA, 20 nt, Artificial Sequence
  HTT spacer sequence GTCN PAM
ugcaguguggccagcucuag

SEQ ID NO: 25767 - RNA, 20 nt, Artificial Sequence
  HTT spacer sequence GTCN PAM
uguuuuuucuccuuggguug

SEQ ID NO: 25768 - RNA, 20 nt, Artificial Sequence
  HTT spacer sequence GTCN PAM
ucugggcugaguucaucuag

SEQ ID NO: 25769 - RNA, 20 nt, Artificial Sequence
  HTT spacer sequence GTCN PAM
cccggaggcacccuggagaa

SEQ ID NO: 25770 - RNA, 20 nt, Artificial Sequence
  HTT spacer sequence GTCN PAM
caggacccaagucugacucu

SEQ ID NO: 25771 - RNA, 20 nt, Artificial Sequence
  HTT spacer sequence GTCN PAM
ugugacgcaagcacgugggg

SEQ ID NO: 25772 - RNA, 20 nt, Artificial Sequence
  HTT spacer sequence GTCN PAM
gacucugccuuagccaugaa

SEQ ID NO: 25773 - RNA, 20 nt, Artificial Sequence
  HTT spacer sequence GTCN PAM
gacuuggguccugugacgca

SEQ ID NO: 25774 - RNA, 20 nt, Artificial Sequence
  HTT spacer sequence GTCN PAM
guuaucauguauuagcuuag

SEQ ID NO: 25775 - RNA, 20 nt, Artificial Sequence
  HTT spacer sequence GTCN PAM
aagcuaauacaugauaacag

SEQ ID NO: 25776 - RNA, 20 nt, Artificial Sequence
  HTT spacer sequence GTCN PAM
uuuauuucuuaacuugaccu

SEQ ID NO: 25777 - RNA, 20 nt, Artificial Sequence
  HTT spacer sequence GTCN PAM
aguuaagaaauaaaggacuc

SEQ ID NO: 25778 - RNA, 20 nt, Artificial Sequence
  HTT spacer sequence GTCN PAM
guuuugccccuuuccacuug

SEQ ID NO: 25779 - RNA, 20 nt, Artificial Sequence
  HTT spacer sequence GTCN PAM
caccucccgccccgcccccu

SEQ ID NO: 25780 - RNA, 20 nt, Artificial Sequence
  HTT spacer sequence GTCN PAM
accccagcucuguuacuucc

SEQ ID NO: 25781 - RNA, 20 nt, Artificial Sequence
  HTT spacer sequence GTCN PAM
uauucucugacacagauagu

SEQ ID NO: 25782 - RNA, 20 nt, Artificial Sequence
  HTT spacer sequence GTCN PAM
gagaauaugacugucaaccc

SEQ ID NO: 25783 - RNA, 20 nt, Artificial Sequence
  HTT spacer sequence GTCN PAM
cugacuuaucucacagaaag

SEQ ID NO: 25784 - RNA, 20 nt, Artificial Sequence
  HTT spacer sequence GTCN PAM
gagacuaucugugucagaga

SEQ ID NO: 25785 - RNA, 20 nt, Artificial Sequence
  HTT spacer sequence GTCN PAM
gcggcagagccugaguuaaa

SEQ ID NO: 25786 - RNA, 20 nt, Artificial Sequence
  HTT spacer sequence GTCN PAM
cguagauuuucuuuuucuuu

SEQ ID NO: 25787 - RNA, 20 nt, Artificial Sequence
  HTT spacer sequence GTCN PAM
ccucacuccccaugggcccc

SEQ ID NO: 25788 - RNA, 20 nt, Artificial Sequence
  HTT spacer sequence GTCN PAM
uuugcaggcacauggaugau

SEQ ID NO: 25789 - RNA, 20 nt, Artificial Sequence
  HTT spacer sequence GTCN PAM
aucauugauggacauucggg

SEQ ID NO: 25790 - RNA, 20 nt, Artificial Sequence
  HTT spacer sequence GTCN PAM
aucaaugauagacuggauua

SEQ ID NO: 25791 - RNA, 20 nt, Artificial Sequence
  HTT spacer sequence GTCN PAM
uugcuauugugacuagugcc

SEQ ID NO: 25792 - RNA, 20 nt, Artificial Sequence
  HTT spacer sequence GTCN PAM
caauagcaaagacuuggaac

SEQ ID NO: 25793 - RNA, 20 nt, Artificial Sequence
  HTT spacer sequence GTCN PAM
uuaucguagaaugauuuaua

SEQ ID NO: 25794 - RNA, 20 nt, Artificial Sequence
  HTT spacer sequence GTCN PAM
aaugguauuucuaguucuag

SEQ ID NO: 25795 - RNA, 20 nt, Artificial Sequence
  HTT spacer sequence GTCN PAM
agaacuagaaauaccauuug

SEQ ID NO: 25796 - RNA, 20 nt, Artificial Sequence
  HTT spacer sequence GTCN PAM
ggcgauuccucaaaggucua

SEQ ID NO: 25797 - RNA, 20 nt, Artificial Sequence
  HTT spacer sequence GTCN PAM
uccacaauaguugaacuaau

SEQ ID NO: 25798 - RNA, 20 nt, Artificial Sequence
  HTT spacer sequence GTCN PAM
cgaaacaacagaugcuggag

SEQ ID NO: 25799 - RNA, 20 nt, Artificial Sequence
  HTT spacer sequence GTCN PAM
uuagagaaaugcagaucaaa

SEQ ID NO: 25800 - RNA, 20 nt, Artificial Sequence
  HTT spacer sequence GTCN PAM
guuggcugcauaaaugucuu

SEQ ID NO: 25801 - RNA, 20 nt, Artificial Sequence
  HTT spacer sequence GTCN PAM
ucuuuugcgaagugucuguu

SEQ ID NO: 25802 - RNA, 20 nt, Artificial Sequence
  HTT spacer sequence GTCN PAM
guucauauccuuuguccauu

SEQ ID NO: 25803 - RNA, 20 nt, Artificial Sequence
  HTT spacer sequence GTCN PAM
auuuuuugaugggguuguuu

SEQ ID NO: 25804 - RNA, 20 nt, Artificial Sequence
  HTT spacer sequence GTCN PAM
gauggguagauugcaaaaau

SEQ ID NO: 25805 - RNA, 20 nt, Artificial Sequence
  HTT spacer sequence GTCN PAM
auuuuggcuuuuguugccau

SEQ ID NO: 25806 - RNA, 20 nt, Artificial Sequence
  HTT spacer sequence GTCN PAM
aaaacaccaaaagcaauggc

SEQ ID NO: 25807 - RNA, 20 nt, Artificial Sequence
  HTT spacer sequence GTCN PAM
uugccuaugccuauguccug

SEQ ID NO: 25808 - RNA, 20 nt, Artificial Sequence
  HTT spacer sequence GTCN PAM
ugaauguuauggcccagguu

SEQ ID NO: 25809 - RNA, 20 nt, Artificial Sequence
  HTT spacer sequence GTCN PAM
uaggucuuauguuuaagucu

SEQ ID NO: 25810 - RNA, 20 nt, Artificial Sequence
  HTT spacer sequence GTCN PAM
uauguuuaagucuuugaucc

SEQ ID NO: 25811 - RNA, 20 nt, Artificial Sequence
  HTT spacer sequence GTCN PAM
uugauccaucuugaguugau

SEQ ID NO: 25812 - RNA, 20 nt, Artificial Sequence
  HTT spacer sequence GTCN PAM
aguuucaguuuucugcaugu

SEQ ID NO: 25813 - RNA, 20 nt, Artificial Sequence
  HTT spacer sequence GTCN PAM
gguuugucaaagaucagaug

SEQ ID NO: 25814 - RNA, 20 nt, Artificial Sequence
  HTT spacer sequence GTCN PAM
aagaucagaugauuguagau

SEQ ID NO: 25815 - RNA, 20 nt, Artificial Sequence
  HTT spacer sequence GTCN PAM
auauaucuguuuugguacca

SEQ ID NO: 25816 - RNA, 20 nt, Artificial Sequence
  HTT spacer sequence GTCN PAM
gguagugugaugccuccagc

SEQ ID NO: 25817 - RNA, 20 nt, Artificial Sequence
  HTT spacer sequence GTCN PAM
uggcuaugcaggcucuuuuu

SEQ ID NO: 25818 - RNA, 20 nt, Artificial Sequence
  HTT spacer sequence GTCN PAM
gugauagcuugaugggggga

SEQ ID NO: 25819 - RNA, 20 nt, Artificial Sequence
  HTT spacer sequence GTCN PAM
uauccaugaacauggaaugu

SEQ ID NO: 25820 - RNA, 20 nt, Artificial Sequence
  HTT spacer sequence GTCN PAM
ucucuuauuuccuugagcag

SEQ ID NO: 25821 - RNA, 20 nt, Artificial Sequence
  HTT spacer sequence GTCN PAM
uucacaucccuuguaaguug

SEQ ID NO: 25822 - RNA, 20 nt, Artificial Sequence
  HTT spacer sequence GTCN PAM
uccuagguguuucauucccu

SEQ ID NO: 25823 - RNA, 20 nt, Artificial Sequence
  HTT spacer sequence GTCN PAM
guuauugguguauaggaaug

SEQ ID NO: 25824 - RNA, 20 nt, Artificial Sequence
  HTT spacer sequence GTCN PAM
caggauacaaaaucaaugug

SEQ ID NO: 25825 - RNA, 20 nt, Artificial Sequence
  HTT spacer sequence GTCN PAM
ucugcaaacagggacaguuu

SEQ ID NO: 25826 - RNA, 20 nt, Artificial Sequence
  HTT spacer sequence GTCN PAM
cuguuugcagaugacaugau

SEQ ID NO: 25827 - RNA, 20 nt, Artificial Sequence
  HTT spacer sequence GTCN PAM
ugugccgguuuucgaaggga

SEQ ID NO: 25828 - RNA, 20 nt, Artificial Sequence
  HTT spacer sequence GTCN PAM
uaaauagcucuuacuauguu

SEQ ID NO: 25829 - RNA, 20 nt, Artificial Sequence
  HTT spacer sequence GTCN PAM
aaggccuuuucugcaucugu

SEQ ID NO: 25830 - RNA, 20 nt, Artificial Sequence
  HTT spacer sequence GTCN PAM
gcuucaucccuggaaugcaa

SEQ ID NO: 25831 - RNA, 20 nt, Artificial Sequence
  HTT spacer sequence GTCN PAM
cugccaggcuuugguaucag

SEQ ID NO: 25832 - RNA, 20 nt, Artificial Sequence
  HTT spacer sequence GTCN PAM
aggauggauucacagccgaa

SEQ ID NO: 25833 - RNA, 20 nt, Artificial Sequence
  HTT spacer sequence GTCN PAM
auucagagauucagcuuuuu

SEQ ID NO: 25834 - RNA, 20 nt, Artificial Sequence
  HTT spacer sequence GTCN PAM
ugggaggguguaugugucca

SEQ ID NO: 25835 - RNA, 20 nt, Artificial Sequence
  HTT spacer sequence GTCN PAM
aggaauuuauccauuucuuc

SEQ ID NO: 25836 - RNA, 20 nt, Artificial Sequence
  HTT spacer sequence GTCN PAM
auuugauucuucucucuuuu

SEQ ID NO: 25837 - RNA, 20 nt, Artificial Sequence
  HTT spacer sequence GTCN PAM
ugcuagcggucuaccuauuu

SEQ ID NO: 25838 - RNA, 20 nt, Artificial Sequence
  HTT spacer sequence GTCN PAM
accuauuuuauugaucuuuu

SEQ ID NO: 25839 - RNA, 20 nt, Artificial Sequence
  HTT spacer sequence GTCN PAM
cuaucuccuucaguucugcu

SEQ ID NO: 25840 - RNA, 20 nt, Artificial Sequence
  HTT spacer sequence GTCN PAM
ucugcuagcuuuugaauuug

SEQ ID NO: 25841 - RNA, 20 nt, Artificial Sequence
  HTT spacer sequence GTCN PAM
cagagauucugguauguugu

SEQ ID NO: 25842 - RNA, 20 nt, Artificial Sequence
  HTT spacer sequence GTCN PAM
ucguucucauugguuuccaa

SEQ ID NO: 25843 - RNA, 20 nt, Artificial Sequence
  HTT spacer sequence GTCN PAM
uucaagagcagguuguucag

SEQ ID NO: 25844 - RNA, 20 nt, Artificial Sequence
  HTT spacer sequence GTCN PAM
gacagacaguuuguugugau

SEQ ID NO: 25845 - RNA, 20 nt, Artificial Sequence
  HTT spacer sequence GTCN PAM
gaccacagugcaaucaaauu

SEQ ID NO: 25846 - RNA, 20 nt, Artificial Sequence
  HTT spacer sequence GTCN PAM
gucagaccacagugcaauca

SEQ ID NO: 25847 - RNA, 20 nt, Artificial Sequence
  HTT spacer sequence GTCN PAM
guuuuagaauaagugcaaug

SEQ ID NO: 25848 - RNA, 20 nt, Artificial Sequence
  HTT spacer sequence GTCN PAM
auuagguccgcuugguccag

SEQ ID NO: 25849 - RNA, 20 nt, Artificial Sequence
  HTT spacer sequence GTCN PAM
gcuugguccagugcugaguu

SEQ ID NO: 25850 - RNA, 20 nt, Artificial Sequence
  HTT spacer sequence GTCN PAM
agugcugaguucaaguccug

SEQ ID NO: 25851 - RNA, 20 nt, Artificial Sequence
  HTT spacer sequence GTCN PAM
uggauauccuuguuaauuuu

SEQ ID NO: 25852 - RNA, 20 nt, Artificial Sequence
  HTT spacer sequence GTCN PAM
auauuaggcagaucaaugag

SEQ ID NO: 25853 - RNA, 20 nt, Artificial Sequence
  HTT spacer sequence GTCN PAM
cccacuauuaccggguggga

SEQ ID NO: 25854 - RNA, 20 nt, Artificial Sequence
  HTT spacer sequence GTCN PAM
cuuuguaggucucuaagaac

SEQ ID NO: 25855 - RNA, 20 nt, Artificial Sequence
  HTT spacer sequence GTCN PAM
cuaagaacuugcuucaugaa

SEQ ID NO: 25856 - RNA, 20 nt, Artificial Sequence
  HTT spacer sequence GTCN PAM
ccuuugaacuuuguugauuu

SEQ ID NO: 25857 - RNA, 20 nt, Artificial Sequence
  HTT spacer sequence GTCN PAM
guuuuaucagagacuaggau

SEQ ID NO: 25858 - RNA, 20 nt, Artificial Sequence
  HTT spacer sequence GTCN PAM
cugauaaaacagacuuuaaa

SEQ ID NO: 25859 - RNA, 20 nt, Artificial Sequence
  HTT spacer sequence GTCN PAM
uugcaugugagaugggucuc

SEQ ID NO: 25860 - RNA, 20 nt, Artificial Sequence
  HTT spacer sequence GTCN PAM
ccugaauacagcacaccaau

SEQ ID NO: 25861 - RNA, 20 nt, Artificial Sequence
  HTT spacer sequence GTCN PAM
ugacucuuuauccaauuugc

SEQ ID NO: 25862 - RNA, 20 nt, Artificial Sequence
  HTT spacer sequence GTCN PAM
agacccauuggugugcugua

SEQ ID NO: 25863 - RNA, 20 nt, Artificial Sequence
  HTT spacer sequence GTCN PAM
gugucuuuuaauuggggcau

SEQ ID NO: 25864 - RNA, 20 nt, Artificial Sequence
  HTT spacer sequence GTCN PAM
uuuaauuggggcauuuagcc

SEQ ID NO: 25865 - RNA, 20 nt, Artificial Sequence
  HTT spacer sequence GTCN PAM
uuaugauccuaguugguuau

SEQ ID NO: 25866 - RNA, 20 nt, Artificial Sequence
  HTT spacer sequence GTCN PAM
guagucuuuacaauuuggca

SEQ ID NO: 25867 - RNA, 20 nt, Artificial Sequence
  HTT spacer sequence GTCN PAM
uuacaauuuggcauguuuuu

SEQ ID NO: 25868 - RNA, 20 nt, Artificial Sequence
  HTT spacer sequence GTCN PAM
ccaccaggccugccuuacaa

SEQ ID NO: 25869 - RNA, 20 nt, Artificial Sequence
  HTT spacer sequence GTCN PAM
guaaaggauuuuauuucucg

SEQ ID NO: 25870 - RNA, 20 nt, Artificial Sequence
  HTT spacer sequence GTCN PAM
gaugggcuucccuuuguggg

SEQ ID NO: 25871 - RNA, 20 nt, Artificial Sequence
  HTT spacer sequence GTCN PAM
gguuacccacaaagggaagc

SEQ ID NO: 25872 - RNA, 20 nt, Artificial Sequence
  HTT spacer sequence GTCN PAM
ugggguugcucuucucgagg

SEQ ID NO: 25873 - RNA, 20 nt, Artificial Sequence
  HTT spacer sequence GTCN PAM
gccuugcuagguuggggaag

SEQ ID NO: 25874 - RNA, 20 nt, Artificial Sequence
  HTT spacer sequence GTCN PAM
uuucacauagucccauauuu

SEQ ID NO: 25875 - RNA, 20 nt, Artificial Sequence
  HTT spacer sequence GTCN PAM
cauauuucuuggaggcuugg

SEQ ID NO: 25876 - RNA, 20 nt, Artificial Sequence
  HTT spacer sequence GTCN PAM
ucucgcuuuauuucauuaau

SEQ ID NO: 25877 - RNA, 20 nt, Artificial Sequence
  HTT spacer sequence GTCN PAM
aagcuuguguauacuucaca

SEQ ID NO: 25878 - RNA, 20 nt, Artificial Sequence
  HTT spacer sequence GTCN PAM
uuuaagcucuucucuacacu

SEQ ID NO: 25879 - RNA, 20 nt, Artificial Sequence
  HTT spacer sequence GTCN PAM
aacauuuuuuucaagguuuu

SEQ ID NO: 25880 - RNA, 20 nt, Artificial Sequence
  HTT spacer sequence GTCN PAM
guaauaacaaacuucuccga

SEQ ID NO: 25881 - RNA, 20 nt, Artificial Sequence
  HTT spacer sequence GTCN PAM
auucaucaaacucauucucc

SEQ ID NO: 25882 - RNA, 20 nt, Artificial Sequence
  HTT spacer sequence GTCN PAM
uugauguuggugaccuacgg

SEQ ID NO: 25883 - RNA, 20 nt, Artificial Sequence
  HTT spacer sequence GTCN PAM
ccaacaucaaagaccaaagg

SEQ ID NO: 25884 - RNA, 20 nt, Artificial Sequence
  HTT spacer sequence GTCN PAM
uuuuuguugauguugaugcu

SEQ ID NO: 25885 - RNA, 20 nt, Artificial Sequence
  HTT spacer sequence GTCN PAM
guuagaaggaaaacuaacaa

SEQ ID NO: 25886 - RNA, 20 nt, Artificial Sequence
  HTT spacer sequence GTCN PAM
guuggaguuugcuggagguc

SEQ ID NO: 25887 - RNA, 20 nt, Artificial Sequence
  HTT spacer sequence GTCN PAM
acuccaggcccuguuugccu

SEQ ID NO: 25888 - RNA, 20 nt, Artificial Sequence
  HTT spacer sequence GTCN PAM
cagagcacgaaggugucugc

SEQ ID NO: 25889 - RNA, 20 nt, Artificial Sequence
  HTT spacer sequence GTCN PAM
gccuguaugagguguuuguu

SEQ ID NO: 25890 - RNA, 20 nt, Artificial Sequence
  HTT spacer sequence GTCN PAM
cccagucaggcuacaugggg

SEQ ID NO: 25891 - RNA, 20 nt, Artificial Sequence
  HTT spacer sequence GTCN PAM
ggcuacaugggggucaggga

SEQ ID NO: 25892 - RNA, 20 nt, Artificial Sequence
  HTT spacer sequence GTCN PAM
gggacccacuugaggcaguc

SEQ ID NO: 25893 - RNA, 20 nt, Artificial Sequence
  HTT spacer sequence GTCN PAM
cugacccccauguagccuga

SEQ ID NO: 25894 - RNA, 20 nt, Artificial Sequence
  HTT spacer sequence GTCN PAM
guucauuaucggagcuugaa

SEQ ID NO: 25895 - RNA, 20 nt, Artificial Sequence
  HTT spacer sequence GTCN PAM
ggcacguauguuuaaaucug

SEQ ID NO: 25896 - RNA, 20 nt, Artificial Sequence
  HTT spacer sequence GTCN PAM
gcugccuuuuguucagaugu

SEQ ID NO: 25897 - RNA, 20 nt, Artificial Sequence
  HTT spacer sequence GTCN PAM
accacugcugaggcuagagu

SEQ ID NO: 25898 - RNA, 20 nt, Artificial Sequence
  HTT spacer sequence GTCN PAM
auuucagagugcugcgcuag

SEQ ID NO: 25899 - RNA, 20 nt, Artificial Sequence
  HTT spacer sequence GTCN PAM
cacgcccauggggccuugcu

SEQ ID NO: 25900 - RNA, 20 nt, Artificial Sequence
  HTT spacer sequence GTCN PAM
gcugguugugaagacugugg

SEQ ID NO: 25901 - RNA, 20 nt, Artificial Sequence
  HTT spacer sequence GTCN PAM
ucacaaccagcagaccagga

SEQ ID NO: 25902 - RNA, 20 nt, Artificial Sequence
  HTT spacer sequence GTCN PAM
cucauggcuuccuuuggcuu

SEQ ID NO: 25903 - RNA, 20 nt, Artificial Sequence
  HTT spacer sequence GTCN PAM
cccgaccccuugugcuuccc

SEQ ID NO: 25904 - RNA, 20 nt, Artificial Sequence
  HTT spacer sequence GTCN PAM
ggggacuucccuuuccaagc

SEQ ID NO: 25905 - RNA, 20 nt, Artificial Sequence
  HTT spacer sequence GTCN PAM
agcaagucccagugagauga

SEQ ID NO: 25906 - RNA, 20 nt, Artificial Sequence
  HTT spacer sequence GTCN PAM
cagugagaugaacuagguac

SEQ ID NO: 25907 - RNA, 20 nt, Artificial Sequence
  HTT spacer sequence GTCN PAM
ucugugucgaucucacuggg

SEQ ID NO: 25908 - RNA, 20 nt, Artificial Sequence
  HTT spacer sequence GTCN PAM
aucucacugggagcuguaga

SEQ ID NO: 25909 - RNA, 20 nt, Artificial Sequence
  HTT spacer sequence GTCN PAM
acagcucccagugagaucga

SEQ ID NO: 25910 - RNA, 20 nt, Artificial Sequence
  HTT spacer sequence GTCN PAM
ugcucugucgcccaggcuga

SEQ ID NO: 25911 - RNA, 20 nt, Artificial Sequence
  HTT spacer sequence GTCN PAM
cccaggcugacgugcaucgg

SEQ ID NO: 25912 - RNA, 20 nt, Artificial Sequence
  HTT spacer sequence GTCN PAM
gccugggcgacagagcaaga

SEQ ID NO: 25913 - RNA, 20 nt, Artificial Sequence
  HTT spacer sequence GTCN PAM
cgaacuccugaccuugugau

SEQ ID NO: 25914 - RNA, 20 nt, Artificial Sequence
  HTT spacer sequence GTCN PAM
ggaguucgagacuagccugg

SEQ ID NO: 25915 - RNA, 20 nt, Artificial Sequence
  HTT spacer sequence GTCN PAM
gccaccacgcccagccauau

SEQ ID NO: 25916 - RNA, 20 nt, Artificial Sequence
  HTT spacer sequence GTCN PAM
ccauguauaacacauuuuag

SEQ ID NO: 25917 - RNA, 20 nt, Artificial Sequence
  HTT spacer sequence GTCN PAM
uaauaauaagguuaaaaaaa

SEQ ID NO: 25918 - RNA, 20 nt, Artificial Sequence
  HTT spacer sequence GTCN PAM
uauauagaaauggcuguuuu

SEQ ID NO: 25919 - RNA, 20 nt, Artificial Sequence
  HTT spacer sequence GTCN PAM
gugaauguaucaaaugcugc

SEQ ID NO: 25920 - RNA, 20 nt, Artificial Sequence
  HTT spacer sequence GTCN PAM
caauuuaaugaagauugaug

SEQ ID NO: 25921 - RNA, 20 nt, Artificial Sequence
  HTT spacer sequence GTCN PAM
uuacaguuaaagguagauuu

SEQ ID NO: 25922 - RNA, 20 nt, Artificial Sequence
  HTT spacer sequence GTCN PAM
ugaaacagcaaaaaagauga

SEQ ID NO: 25923 - RNA, 20 nt, Artificial Sequence
  HTT spacer sequence GTCN PAM
uuuagagggggauauguagg

SEQ ID NO: 25924 - RNA, 20 nt, Artificial Sequence
  HTT spacer sequence GTCN PAM
ggggccaagugcaaacaaga

SEQ ID NO: 25925 - RNA, 20 nt, Artificial Sequence
  HTT spacer sequence GTCN PAM
gugagggagauuccucaaaa

SEQ ID NO: 25926 - RNA, 20 nt, Artificial Sequence
  HTT spacer sequence GTCN PAM
ggccaggcuugagauauaca

SEQ ID NO: 25927 - RNA, 20 nt, Artificial Sequence
  HTT spacer sequence GTCN PAM
cagauaaggcucaauaguuu

SEQ ID NO: 25928 - RNA, 20 nt, Artificial Sequence
  HTT spacer sequence GTCN PAM
gagcacaaguguagcuggag

SEQ ID NO: 25929 - RNA, 20 nt, Artificial Sequence
  HTT spacer sequence GTCN PAM
ccacaucaagcucaccucuc

SEQ ID NO: 25930 - RNA, 20 nt, Artificial Sequence
  HTT spacer sequence GTCN PAM
gaagaaaaccugcucauacc

SEQ ID NO: 25931 - RNA, 20 nt, Artificial Sequence
  HTT spacer sequence GTCN PAM
cugugccuuuaaauccugga

SEQ ID NO: 25932 - RNA, 20 nt, Artificial Sequence
  HTT spacer sequence GTCN PAM
agaauguggaauuauuauuu

SEQ ID NO: 25933 - RNA, 20 nt, Artificial Sequence
  HTT spacer sequence GTCN PAM
ucuaauccuuauuuauucca

SEQ ID NO: 25934 - RNA, 20 nt, Artificial Sequence
  HTT spacer sequence GTCN PAM
auaauauaaugcaaaagaaa

SEQ ID NO: 25935 - RNA, 20 nt, Artificial Sequence
  HTT spacer sequence GTCN PAM
gguuuaagacuuuaucugca

SEQ ID NO: 25936 - RNA, 20 nt, Artificial Sequence
  HTT spacer sequence GTCN PAM
uaaaccagacaaaacauaua

SEQ ID NO: 25937 - RNA, 20 nt, Artificial Sequence
  HTT spacer sequence GTCN PAM
cuacaaaaagaaaaacaaaa

SEQ ID NO: 25938 - RNA, 20 nt, Artificial Sequence
  HTT spacer sequence GTCN PAM
guggucccagcuacucgggg

SEQ ID NO: 25939 - RNA, 20 nt, Artificial Sequence
  HTT spacer sequence GTCN PAM
cagcuacucggggcugaggu

SEQ ID NO: 25940 - RNA, 20 nt, Artificial Sequence
  HTT spacer sequence GTCN PAM
cccaugcuggagugcaaugg

SEQ ID NO: 25941 - RNA, 20 nt, Artificial Sequence
  HTT spacer sequence GTCN PAM
gucacccaugcuggagugca

SEQ ID NO: 25942 - RNA, 20 nt, Artificial Sequence
  HTT spacer sequence GTCN PAM
guuuugggugauuugauaau

SEQ ID NO: 25943 - RNA, 20 nt, Artificial Sequence
  HTT spacer sequence GTCN PAM
guggcuucauaguauuuuua

SEQ ID NO: 25944 - RNA, 20 nt, Artificial Sequence
  HTT spacer sequence GTCN PAM
caaaaaaaaaaaaaagaaag

SEQ ID NO: 25945 - RNA, 20 nt, Artificial Sequence
  HTT spacer sequence GTCN PAM
cgcucugucgccugcguugg

SEQ ID NO: 25946 - RNA, 20 nt, Artificial Sequence
  HTT spacer sequence GTCN PAM
ccugcguuggagugcaguga

SEQ ID NO: 25947 - RNA, 20 nt, Artificial Sequence
  HTT spacer sequence GTCN PAM
cugcacuccaacgcaggcga

SEQ ID NO: 25948 - RNA, 20 nt, Artificial Sequence
  HTT spacer sequence GTCN PAM
cagcuacucaggaggcugag

SEQ ID NO: 25949 - RNA, 20 nt, Artificial Sequence
  HTT spacer sequence GTCN PAM
cuacuaaaaauacaaaaaau

SEQ ID NO: 25950 - RNA, 20 nt, Artificial Sequence
  HTT spacer sequence GTCN PAM
caaucuccugaccucgugau

SEQ ID NO: 25951 - RNA, 20 nt, Artificial Sequence
  HTT spacer sequence GTCN PAM
ggagauugagaccauccugg

SEQ ID NO: 25952 - RNA, 20 nt, Artificial Sequence
  HTT spacer sequence GTCN PAM
cauagcuuacugaugcucuu

SEQ ID NO: 25953 - RNA, 20 nt, Artificial Sequence
  HTT spacer sequence GTCN PAM
acucuguuguuaaucuguua

SEQ ID NO: 25954 - RNA, 20 nt, Artificial Sequence
  HTT spacer sequence GTCN PAM
agcguauuuuuuuuuuuguu

SEQ ID NO: 25955 - RNA, 20 nt, Artificial Sequence
  HTT spacer sequence GTCN PAM
cacucuguugcccaggcugg

SEQ ID NO: 25956 - RNA, 20 nt, Artificial Sequence
  HTT spacer sequence GTCN PAM
cagcuacucgggaggcugag

SEQ ID NO: 25957 - RNA, 20 nt, Artificial Sequence
  HTT spacer sequence GTCN PAM
ggaguucaaggccaguuugg

SEQ ID NO: 25958 - RNA, 20 nt, Artificial Sequence
  HTT spacer sequence GTCN PAM
cccaaaguguugggauuaua

SEQ ID NO: 25959 - RNA, 20 nt, Artificial Sequence
  HTT spacer sequence GTCN PAM
ggccccuguucaguguauau

SEQ ID NO: 25960 - RNA, 20 nt, Artificial Sequence
  HTT spacer sequence GTCN PAM
uuuaaaaaugucucccugug

SEQ ID NO: 25961 - RNA, 20 nt, Artificial Sequence
  HTT spacer sequence GTCN PAM
cccuguguuucuguuuagcu

SEQ ID NO: 25962 - RNA, 20 nt, Artificial Sequence
  HTT spacer sequence GTCN PAM
ugcuuuauaauuugucagau

SEQ ID NO: 25963 - RNA, 20 nt, Artificial Sequence
  HTT spacer sequence GTCN PAM
gauggguuggagcagugcuu

SEQ ID NO: 25964 - RNA, 20 nt, Artificial Sequence
  HTT spacer sequence GTCN PAM
uaaacuaagcacugcuccaa

SEQ ID NO: 25965 - RNA, 20 nt, Artificial Sequence
  HTT spacer sequence GTCN PAM
aaaaaaaaaauuaguccuaa

SEQ ID NO: 25966 - RNA, 20 nt, Artificial Sequence
  HTT spacer sequence GTCN PAM
ugccuccuaagcaugguacc

SEQ ID NO: 25967 - RNA, 20 nt, Artificial Sequence
  HTT spacer sequence GTCN PAM
gccugcugagaacagugacu

SEQ ID NO: 25968 - RNA, 20 nt, Artificial Sequence
  HTT spacer sequence GTCN PAM
cuguucucagcaggcggacu

SEQ ID NO: 25969 - RNA, 20 nt, Artificial Sequence
  HTT spacer sequence GTCN PAM
cucucgaguacucagcagag

SEQ ID NO: 25970 - RNA, 20 nt, Artificial Sequence
  HTT spacer sequence GTCN PAM
uguuuucucuucucuggugc

SEQ ID NO: 25971 - RNA, 20 nt, Artificial Sequence
  HTT spacer sequence GTCN PAM
uaugaacuguggcugucuug

SEQ ID NO: 25972 - RNA, 20 nt, Artificial Sequence
  HTT spacer sequence GTCN PAM
uggucuccuuagauucucag

SEQ ID NO: 25973 - RNA, 20 nt, Artificial Sequence
  HTT spacer sequence GTCN PAM
ccuuagauucucagcaccuc

SEQ ID NO: 25974 - RNA, 20 nt, Artificial Sequence
  HTT spacer sequence GTCN PAM
cuccuccuugugccacagcc

SEQ ID NO: 25975 - RNA, 20 nt, Artificial Sequence
  HTT spacer sequence GTCN PAM
gcccuauggcugccccaacu

SEQ ID NO: 25976 - RNA, 20 nt, Artificial Sequence
  HTT spacer sequence GTCN PAM
cucgucucccagggaucacu

SEQ ID NO: 25977 - RNA, 20 nt, Artificial Sequence
  HTT spacer sequence GTCN PAM
cccagggaucacuguccuuc

SEQ ID NO: 25978 - RNA, 20 nt, Artificial Sequence
  HTT spacer sequence GTCN PAM
uucauugcucauguccagug

SEQ ID NO: 25979 - RNA, 20 nt, Artificial Sequence
  HTT spacer sequence GTCN PAM
agugucuugaggacucuggg

SEQ ID NO: 25980 - RNA, 20 nt, Artificial Sequence
  HTT spacer sequence GTCN PAM
ugaggacucuggguuuuguc

SEQ ID NO: 25981 - RNA, 20 nt, Artificial Sequence
  HTT spacer sequence GTCN PAM
ucaagacacuggacaugagc

SEQ ID NO: 25982 - RNA, 20 nt, Artificial Sequence
  HTT spacer sequence GTCN PAM
guuuuguuuuuugguuugcu

SEQ ID NO: 25983 - RNA, 20 nt, Artificial Sequence
  HTT spacer sequence GTCN PAM
caggcaggaggguaaaccca

SEQ ID NO: 25984 - RNA, 20 nt, Artificial Sequence
  HTT spacer sequence GTCN PAM
cucacccucauugugcucag

SEQ ID NO: 25985 - RNA, 20 nt, Artificial Sequence
  HTT spacer sequence GTCN PAM
cacucuauuacauuagauau

SEQ ID NO: 25986 - RNA, 20 nt, Artificial Sequence
  HTT spacer sequence GTCN PAM
uuuguuagacaaguagugau

SEQ ID NO: 25987 - RNA, 20 nt, Artificial Sequence
  HTT spacer sequence GTCN PAM
aacaaaggacuuuaacaaau

SEQ ID NO: 25988 - RNA, 20 nt, Artificial Sequence
  HTT spacer sequence GTCN PAM
cacaccacuuuuuguuuuua

SEQ ID NO: 25989 - RNA, 20 nt, Artificial Sequence
  HTT spacer sequence GTCN PAM
gaauugaauuugucacacac

SEQ ID NO: 25990 - RNA, 20 nt, Artificial Sequence
  HTT spacer sequence GTCN PAM
aauugguguuggcuuuuagc

SEQ ID NO: 25991 - RNA, 20 nt, Artificial Sequence
  HTT spacer sequence GTCN PAM
aucucaaaaaaaaaaaaaaa

SEQ ID NO: 25992 - RNA, 20 nt, Artificial Sequence
  HTT spacer sequence GTCN PAM
ggcuggucuugaacuccuga

SEQ ID NO: 25993 - RNA, 20 nt, Artificial Sequence
  HTT spacer sequence GTCN PAM
ugaacuccugaccucaagug

SEQ ID NO: 25994 - RNA, 20 nt, Artificial Sequence
  HTT spacer sequence GTCN PAM
ggaguucaagaccagccuga

SEQ ID NO: 25995 - RNA, 20 nt, Artificial Sequence
  HTT spacer sequence GTCN PAM
uuuucaagaaucaagaaggg

SEQ ID NO: 25996 - RNA, 20 nt, Artificial Sequence
  HTT spacer sequence GTCN PAM
uuuuugcagauuauuuuaag

SEQ ID NO: 25997 - RNA, 20 nt, Artificial Sequence
  HTT spacer sequence GTCN PAM
uaaaauaaucugcaaaaaug

SEQ ID NO: 25998 - RNA, 20 nt, Artificial Sequence
  HTT spacer sequence GTCN PAM
uagaauugucuuaaaauaau

SEQ ID NO: 25999 - RNA, 20 nt, Artificial Sequence
  HTT spacer sequence GTCN PAM
uguucgcagggcaggaauuc

SEQ ID NO: 26000 - RNA, 20 nt, Artificial Sequence
  HTT spacer sequence GTCN PAM
auuagguauccaguccuguu

SEQ ID NO: 26001 - RNA, 20 nt, Artificial Sequence
  HTT spacer sequence GTCN PAM
ugaaauccaaguuauauaca

SEQ ID NO: 26002 - RNA, 20 nt, Artificial Sequence
  HTT spacer sequence GTCN PAM
guaaaaagucuugaaaucca

SEQ ID NO: 26003 - RNA, 20 nt, Artificial Sequence
  HTT spacer sequence GTCN PAM
aggauucguacaauaacggg

SEQ ID NO: 26004 - RNA, 20 nt, Artificial Sequence
  HTT spacer sequence GTCN PAM
ucucugagucgcuuaauguc

SEQ ID NO: 26005 - RNA, 20 nt, Artificial Sequence
  HTT spacer sequence GTCN PAM
cuuaaugucucacuugucuu

SEQ ID NO: 26006 - RNA, 20 nt, Artificial Sequence
  HTT spacer sequence GTCN PAM
cacuugucuuucuacagugu

SEQ ID NO: 26007 - RNA, 20 nt, Artificial Sequence
  HTT spacer sequence GTCN PAM
uucuacaguguguugaagag

SEQ ID NO: 26008 - RNA, 20 nt, Artificial Sequence
  HTT spacer sequence GTCN PAM
agaaccaaugauggcaacug

SEQ ID NO: 26009 - RNA, 20 nt, Artificial Sequence
  HTT spacer sequence GTCN PAM
uaacagaagaggaaaagaau

SEQ ID NO: 26010 - RNA, 20 nt, Artificial Sequence
  HTT spacer sequence GTCN PAM
uacccgaacgucuuaacaga

SEQ ID NO: 26011 - RNA, 20 nt, Artificial Sequence
  HTT spacer sequence GTCN PAM
agcgcagcacuuuuuggcuc

SEQ ID NO: 26012 - RNA, 20 nt, Artificial Sequence
  HTT spacer sequence GTCN PAM
augauugagccaagaggcca

SEQ ID NO: 26013 - RNA, 20 nt, Artificial Sequence
  HTT spacer sequence GTCN PAM
uccuggggagugaagggaag

SEQ ID NO: 26014 - RNA, 20 nt, Artificial Sequence
  HTT spacer sequence GTCN PAM
gucacuguggagggcagagg

SEQ ID NO: 26015 - RNA, 20 nt, Artificial Sequence
  HTT spacer sequence GTCN PAM
cuguggagggcagaggacac

SEQ ID NO: 26016 - RNA, 20 nt, Artificial Sequence
  HTT spacer sequence GTCN PAM
ucugcccuccacagugacag

SEQ ID NO: 26017 - RNA, 20 nt, Artificial Sequence
  HTT spacer sequence GTCN PAM
cucggaguuucuguuuagaa

SEQ ID NO: 26018 - RNA, 20 nt, Artificial Sequence
  HTT spacer sequence GTCN PAM
uugcuaacauauccaguuau

SEQ ID NO: 26019 - RNA, 20 nt, Artificial Sequence
  HTT spacer sequence GTCN PAM
ucaacaacuacagugaaaaa

SEQ ID NO: 26020 - RNA, 20 nt, Artificial Sequence
  HTT spacer sequence GTCN PAM
caaggccgagcacagcgccu

SEQ ID NO: 26021 - RNA, 20 nt, Artificial Sequence
  HTT spacer sequence GTCN PAM
gcgagggccugggugaagug

SEQ ID NO: 26022 - RNA, 20 nt, Artificial Sequence
  HTT spacer sequence GTCN PAM
uucuccugcuccgccugcac

SEQ ID NO: 26023 - RNA, 20 nt, Artificial Sequence
  HTT spacer sequence GTCN PAM
uugguggaagcacgaaagag

SEQ ID NO: 26024 - RNA, 20 nt, Artificial Sequence
  HTT spacer sequence GTCN PAM
gcuguauucagagaacucua

SEQ ID NO: 26025 - RNA, 20 nt, Artificial Sequence
  HTT spacer sequence GTCN PAM
caagcccaucucacucacug

SEQ ID NO: 26026 - RNA, 20 nt, Artificial Sequence
  HTT spacer sequence GTCN PAM
gcaaaccagaaugcaguuca

SEQ ID NO: 26027 - RNA, 20 nt, Artificial Sequence
  HTT spacer sequence GTCN PAM
ccacccauucaaagcacagg

SEQ ID NO: 26028 - RNA, 20 nt, Artificial Sequence
  HTT spacer sequence GTCN PAM
ugugcuuugaaugggugggg

SEQ ID NO: 26029 - RNA, 20 nt, Artificial Sequence
  HTT spacer sequence GTCN PAM
gcuuuaugacuagaagucuc

SEQ ID NO: 26030 - RNA, 20 nt, Artificial Sequence
  HTT spacer sequence GTCN PAM
uaaagcugacaaaacacaag

SEQ ID NO: 26031 - RNA, 20 nt, Artificial Sequence
  HTT spacer sequence GTCN PAM
cuuuucacuuaaauuuguuu

SEQ ID NO: 26032 - RNA, 20 nt, Artificial Sequence
  HTT spacer sequence GTCN PAM
caaaaaaaaaaaaaacaaau

SEQ ID NO: 26033 - RNA, 20 nt, Artificial Sequence
  HTT spacer sequence GTCN PAM
ugcucugucgcccaggcugg

SEQ ID NO: 26034 - RNA, 20 nt, Artificial Sequence
  HTT spacer sequence GTCN PAM
cccaggcuggagugcagugg

SEQ ID NO: 26035 - RNA, 20 nt, Artificial Sequence
  HTT spacer sequence GTCN PAM
cagcuacucgggaggcugag

SEQ ID NO: 26036 - RNA, 20 nt, Artificial Sequence
  HTT spacer sequence GTCN PAM
cuacuaaaaauacaaaaaaa

SEQ ID NO: 26037 - RNA, 20 nt, Artificial Sequence
  HTT spacer sequence GTCN PAM
cgaucuccugaccucgugau

SEQ ID NO: 26038 - RNA, 20 nt, Artificial Sequence
  HTT spacer sequence GTCN PAM
ggagaucgagaccauccugg

SEQ ID NO: 26039 - RNA, 20 nt, Artificial Sequence
  HTT spacer sequence GTCN PAM
cggccucccaaagugcuggg

SEQ ID NO: 26040 - RNA, 20 nt, Artificial Sequence
  HTT spacer sequence GTCN PAM
uguauacuaggcauuaaaaa

SEQ ID NO: 26041 - RNA, 20 nt, Artificial Sequence
  HTT spacer sequence GTCN PAM
ggagucaaggaaaauaccca

SEQ ID NO: 26042 - RNA, 20 nt, Artificial Sequence
  HTT spacer sequence GTCN PAM
aggaaaauacccauguucca

SEQ ID NO: 26043 - RNA, 20 nt, Artificial Sequence
  HTT spacer sequence GTCN PAM
guuucaaugcuuucuguaac

SEQ ID NO: 26044 - RNA, 20 nt, Artificial Sequence
  HTT spacer sequence GTCN PAM
uccaaaaaaaucauguaauu

SEQ ID NO: 26045 - RNA, 20 nt, Artificial Sequence
  HTT spacer sequence GTCN PAM
uuuaaaagaucaguaauuua

SEQ ID NO: 26046 - RNA, 20 nt, Artificial Sequence
  HTT spacer sequence GTCN PAM
uaagugagauuugagagaaa

SEQ ID NO: 26047 - RNA, 20 nt, Artificial Sequence
  HTT spacer sequence GTCN PAM
guuuccuguagcagaaaaaa

SEQ ID NO: 26048 - RNA, 20 nt, Artificial Sequence
  HTT spacer sequence GTCN PAM
gagcuuuuuucugcuacagg

SEQ ID NO: 26049 - RNA, 20 nt, Artificial Sequence
  HTT spacer sequence GTCN PAM
ccucacucgcagaaggcuac

SEQ ID NO: 26050 - RNA, 20 nt, Artificial Sequence
  HTT spacer sequence GTCN PAM
ggcagcuguaaacucuaaau

SEQ ID NO: 26051 - RNA, 20 nt, Artificial Sequence
  HTT spacer sequence GTCN PAM
uuaucugaagagggcgaugc

SEQ ID NO: 26052 - RNA, 20 nt, Artificial Sequence
  HTT spacer sequence GTCN PAM
gauugagaaacaacuugaaa

SEQ ID NO: 26053 - RNA, 20 nt, Artificial Sequence
  HTT spacer sequence GTCN PAM
uccagaaagugucuacccag

SEQ ID NO: 26054 - RNA, 20 nt, Artificial Sequence
  HTT spacer sequence GTCN PAM
acccaguugaagacaaaccu

SEQ ID NO: 26055 - RNA, 20 nt, Artificial Sequence
  HTT spacer sequence GTCN PAM
ucaacuggguagacacuuuc

SEQ ID NO: 26056 - RNA, 20 nt, Artificial Sequence
  HTT spacer sequence GTCN PAM
caaagaaccgugcagauaag

SEQ ID NO: 26057 - RNA, 20 nt, Artificial Sequence
  HTT spacer sequence GTCN PAM
gugcuagagaggaaacugga

SEQ ID NO: 26058 - RNA, 20 nt, Artificial Sequence
  HTT spacer sequence GTCN PAM
cagcuccaguuuccucucua

SEQ ID NO: 26059 - RNA, 20 nt, Artificial Sequence
  HTT spacer sequence GTCN PAM
uguacuguuuuaaagcuuuu

SEQ ID NO: 26060 - RNA, 20 nt, Artificial Sequence
  HTT spacer sequence GTCN PAM
ucuggauucagaucagguuu

SEQ ID NO: 26061 - RNA, 20 nt, Artificial Sequence
  HTT spacer sequence GTCN PAM
cuuuuaucuuucauccauca

SEQ ID NO: 26062 - RNA, 20 nt, Artificial Sequence
  HTT spacer sequence GTCN PAM
uuuaggguaauuuguacuaa

SEQ ID NO: 26063 - RNA, 20 nt, Artificial Sequence
  HTT spacer sequence GTCN PAM
gcauguuucccucaucaguu

SEQ ID NO: 26064 - RNA, 20 nt, Artificial Sequence
  HTT spacer sequence GTCN PAM
gcauccuugccccagcuccc

SEQ ID NO: 26065 - RNA, 20 nt, Artificial Sequence
  HTT spacer sequence GTCN PAM
agggagcuggggcaaggaug

SEQ ID NO: 26066 - RNA, 20 nt, Artificial Sequence
  HTT spacer sequence GTCN PAM
cauccacuugccuccccucc

SEQ ID NO: 26067 - RNA, 20 nt, Artificial Sequence
  HTT spacer sequence GTCN PAM
ugcuaaauuccauuccuuuu

SEQ ID NO: 26068 - RNA, 20 nt, Artificial Sequence
  HTT spacer sequence GTCN PAM
caguuacuguccugcuaaau

SEQ ID NO: 26069 - RNA, 20 nt, Artificial Sequence
  HTT spacer sequence GTCN PAM
augugggagcuguguggcuc

SEQ ID NO: 26070 - RNA, 20 nt, Artificial Sequence
  HTT spacer sequence GTCN PAM
agaggggaagcgugcaaaug

SEQ ID NO: 26071 - RNA, 20 nt, Artificial Sequence
  HTT spacer sequence GTCN PAM
ugucccuucaugaugcacau

SEQ ID NO: 26072 - RNA, 20 nt, Artificial Sequence
  HTT spacer sequence GTCN PAM
cuucaugaugcacauuuucc

SEQ ID NO: 26073 - RNA, 20 nt, Artificial Sequence
  HTT spacer sequence GTCN PAM
caguuaaaucacugcagaug

SEQ ID NO: 26074 - RNA, 20 nt, Artificial Sequence
  HTT spacer sequence GTCN PAM
aaauuuaacugucauuuuug

SEQ ID NO: 26075 - RNA, 20 nt, Artificial Sequence
  HTT spacer sequence GTCN PAM
uuuuugagccgugaucuugg

SEQ ID NO: 26076 - RNA, 20 nt, Artificial Sequence
  HTT spacer sequence GTCN PAM
agaaggaaauagagaagugu

SEQ ID NO: 26077 - RNA, 20 nt, Artificial Sequence
  HTT spacer sequence GTCN PAM
gcacuguuacucaccugaaa

SEQ ID NO: 26078 - RNA, 20 nt, Artificial Sequence
  HTT spacer sequence GTCN PAM
guuucccuaggagaacugag

SEQ ID NO: 26079 - RNA, 20 nt, Artificial Sequence
  HTT spacer sequence GTCN PAM
acacugauuuuccacagugg

SEQ ID NO: 26080 - RNA, 20 nt, Artificial Sequence
  HTT spacer sequence GTCN PAM
cgcucugucacccaggcugg

SEQ ID NO: 26081 - RNA, 20 nt, Artificial Sequence
  HTT spacer sequence GTCN PAM
cccaggcuggagugcagggg

SEQ ID NO: 26082 - RNA, 20 nt, Artificial Sequence
  HTT spacer sequence GTCN PAM
cagcuacucgggaggcugag

SEQ ID NO: 26083 - RNA, 20 nt, Artificial Sequence
  HTT spacer sequence GTCN PAM
cuacuaaaaauacaaaaaau

SEQ ID NO: 26084 - RNA, 20 nt, Artificial Sequence
  HTT spacer sequence GTCN PAM
ccaucuccugaccucgugau

SEQ ID NO: 26085 - RNA, 20 nt, Artificial Sequence
  HTT spacer sequence GTCN PAM
ggagauggagaccauccugg

SEQ ID NO: 26086 - RNA, 20 nt, Artificial Sequence
  HTT spacer sequence GTCN PAM
ucccagcacuuugggaggcc

SEQ ID NO: 26087 - RNA, 20 nt, Artificial Sequence
  HTT spacer sequence GTCN PAM
gcuuuuaaugaaggaggcau

SEQ ID NO: 26088 - RNA, 20 nt, Artificial Sequence
  HTT spacer sequence GTCN PAM
gaagaaaauccgucuaaaug

SEQ ID NO: 26089 - RNA, 20 nt, Artificial Sequence
  HTT spacer sequence GTCN PAM
aaaugggccauugcucuccu

SEQ ID NO: 26090 - RNA, 20 nt, Artificial Sequence
  HTT spacer sequence GTCN PAM
uugggaacuucuuuuccuuu

SEQ ID NO: 26091 - RNA, 20 nt, Artificial Sequence
  HTT spacer sequence GTCN PAM
aaggaaaggaaaagaaguuc

SEQ ID NO: 26092 - RNA, 20 nt, Artificial Sequence
  HTT spacer sequence GTCN PAM
gccuccuagugucaaaggaa

SEQ ID NO: 26093 - RNA, 20 nt, Artificial Sequence
  HTT spacer sequence GTCN PAM
auggcugugggcagcagggg

SEQ ID NO: 26094 - RNA, 20 nt, Artificial Sequence
  HTT spacer sequence GTCN PAM
uuguucuuacuagaauggaa

SEQ ID NO: 26095 - RNA, 20 nt, Artificial Sequence
  HTT spacer sequence GTCN PAM
ccuuucucccaguucuuaag

SEQ ID NO: 26096 - RNA, 20 nt, Artificial Sequence
  HTT spacer sequence GTCN PAM
cuguacugaaucuuaagaac

SEQ ID NO: 26097 - RNA, 20 nt, Artificial Sequence
  HTT spacer sequence GTCN PAM
guucuaguguucuauucuug

SEQ ID NO: 26098 - RNA, 20 nt, Artificial Sequence
  HTT spacer sequence GTCN PAM
gguugggaaagcugacagcu

SEQ ID NO: 26099 - RNA, 20 nt, Artificial Sequence
  HTT spacer sequence GTCN PAM
gcuuucccaaccugacgggg

SEQ ID NO: 26100 - RNA, 20 nt, Artificial Sequence
  HTT spacer sequence GTCN PAM
cacuguauucccugcagcug

SEQ ID NO: 26101 - RNA, 20 nt, Artificial Sequence
  HTT spacer sequence GTCN PAM
ccucucagaugguuggggga

SEQ ID NO: 26102 - RNA, 20 nt, Artificial Sequence
  HTT spacer sequence GTCN PAM
cccaaccaucugagaggcga

SEQ ID NO: 26103 - RNA, 20 nt, Artificial Sequence
  HTT spacer sequence GTCN PAM
acuccuuuggguaucuuauu

SEQ ID NO: 26104 - RNA, 20 nt, Artificial Sequence
  HTT spacer sequence GTCN PAM
accuucgucccccaaccauc

SEQ ID NO: 26105 - RNA, 20 nt, Artificial Sequence
  HTT spacer sequence GTCN PAM
ccaagguguaauuuugggua

SEQ ID NO: 26106 - RNA, 20 nt, Artificial Sequence
  HTT spacer sequence GTCN PAM
gaugucucuuggaauuuauu

SEQ ID NO: 26107 - RNA, 20 nt, Artificial Sequence
  HTT spacer sequence GTCN PAM
cuuggaauuuauuauuuguu

SEQ ID NO: 26108 - RNA, 20 nt, Artificial Sequence
  HTT spacer sequence GTCN PAM
aauuuaucagcugucaagaa

SEQ ID NO: 26109 - RNA, 20 nt, Artificial Sequence
  HTT spacer sequence GTCN PAM
agaauuuuauuuaaaauuua

SEQ ID NO: 26110 - RNA, 20 nt, Artificial Sequence
  HTT spacer sequence GTCN PAM
gauuuccauuuaaagaaaac

SEQ ID NO: 26111 - RNA, 20 nt, Artificial Sequence
  HTT spacer sequence GTCN PAM
ugagauauacauuaauuuuu

SEQ ID NO: 26112 - RNA, 20 nt, Artificial Sequence
  HTT spacer sequence GTCN PAM
guauucauugcacauuucaa

SEQ ID NO: 26113 - RNA, 20 nt, Artificial Sequence
  HTT spacer sequence GTCN PAM
acacaauuaaaugcuuugaa

SEQ ID NO: 26114 - RNA, 20 nt, Artificial Sequence
  HTT spacer sequence GTCN PAM
uuaguaauuauuaugcauuu

SEQ ID NO: 26115 - RNA, 20 nt, Artificial Sequence
  HTT spacer sequence GTCN PAM
auuacagguuuauaauuauu

SEQ ID NO: 26116 - RNA, 20 nt, Artificial Sequence
  HTT spacer sequence GTCN PAM
ggaaacauaguguuuauucu

SEQ ID NO: 26117 - RNA, 20 nt, Artificial Sequence
  HTT spacer sequence GTCN PAM
uguaauuagaauaaacacua

SEQ ID NO: 26118 - RNA, 20 nt, Artificial Sequence
  HTT spacer sequence GTCN PAM
ggugccuucuaccugcugcc

SEQ ID NO: 26119 - RNA, 20 nt, Artificial Sequence
  HTT spacer sequence GTCN PAM
cugcucugcgcgagggcaca

SEQ ID NO: 26120 - RNA, 20 nt, Artificial Sequence
  HTT spacer sequence GTCN PAM
gugaucuacucuaaccccac

SEQ ID NO: 26121 - RNA, 20 nt, Artificial Sequence
  HTT spacer sequence GTCN PAM
agguugaaucaugaauuauu

SEQ ID NO: 26122 - RNA, 20 nt, Artificial Sequence
  HTT spacer sequence GTCN PAM
aaauggauguuuuuguuuuu

SEQ ID NO: 26123 - RNA, 20 nt, Artificial Sequence
  HTT spacer sequence GTCN PAM
cagccuuccuuccacuggcc

SEQ ID NO: 26124 - RNA, 20 nt, Artificial Sequence
  HTT spacer sequence GTCN PAM
cguuaccaugugucacagcc

SEQ ID NO: 26125 - RNA, 20 nt, Artificial Sequence
  HTT spacer sequence GTCN PAM
ucuucggugucgugaugugc

SEQ ID NO: 26126 - RNA, 20 nt, Artificial Sequence
  HTT spacer sequence GTCN PAM
ucggugucgugaugugcuug

SEQ ID NO: 26127 - RNA, 20 nt, Artificial Sequence
  HTT spacer sequence GTCN PAM
ugaugugcuuggcaguguuc

SEQ ID NO: 26128 - RNA, 20 nt, Artificial Sequence
  HTT spacer sequence GTCN PAM
guggcagccaugugcuucuc

SEQ ID NO: 26129 - RNA, 20 nt, Artificial Sequence
  HTT spacer sequence GTCN PAM
guguaugugaagguacuggu

SEQ ID NO: 26130 - RNA, 20 nt, Artificial Sequence
  HTT spacer sequence GTCN PAM
cuaaccaguaccuucacaua

SEQ ID NO: 26131 - RNA, 20 nt, Artificial Sequence
  HTT spacer sequence GTCN PAM
aacuauaucuccaauaccac

SEQ ID NO: 26132 - RNA, 20 nt, Artificial Sequence
  HTT spacer sequence GTCN PAM
auagggcaaugcuggaagau

SEQ ID NO: 26133 - RNA, 20 nt, Artificial Sequence
  HTT spacer sequence GTCN PAM
gggaggggucaauagggcaa

SEQ ID NO: 26134 - RNA, 20 nt, Artificial Sequence
  HTT spacer sequence GTCN PAM
aaguucaaaagccuacagau

SEQ ID NO: 26135 - RNA, 20 nt, Artificial Sequence
  HTT spacer sequence GTCN PAM
cugucaaaguucaaaagccu

SEQ ID NO: 26136 - RNA, 20 nt, Artificial Sequence
  HTT spacer sequence GTCN PAM
uaggaugugucccugucaaa

SEQ ID NO: 26137 - RNA, 20 nt, Artificial Sequence
  HTT spacer sequence GTCN PAM
uuucgacucagcgugugugc

SEQ ID NO: 26138 - RNA, 20 nt, Artificial Sequence
  HTT spacer sequence GTCN PAM
aaaagacucuaaguaguagu

SEQ ID NO: 26139 - RNA, 20 nt, Artificial Sequence
  HTT spacer sequence GTCN PAM
gccaaggcccugccucgcaa

SEQ ID NO: 26140 - RNA, 20 nt, Artificial Sequence
  HTT spacer sequence GTCN PAM
aggaaaccaaacaccuaugc

SEQ ID NO: 26141 - RNA, 20 nt, Artificial Sequence
  HTT spacer sequence GTCN PAM
uuggacagaaaaucaguagg

SEQ ID NO: 26142 - RNA, 20 nt, Artificial Sequence
  HTT spacer sequence GTCN PAM
aaagacccuccaaguccagg

SEQ ID NO: 26143 - RNA, 20 nt, Artificial Sequence
  HTT spacer sequence GTCN PAM
ucugugagagggucagagag

SEQ ID NO: 26144 - RNA, 20 nt, Artificial Sequence
  HTT spacer sequence GTCN PAM
gagaguauacccaugcgugc

SEQ ID NO: 26145 - RNA, 20 nt, Artificial Sequence
  HTT spacer sequence GTCN PAM
gugaguauuccugugugugc

SEQ ID NO: 26146 - RNA, 20 nt, Artificial Sequence
  HTT spacer sequence GTCN PAM
cagggccggagagaguaugu

SEQ ID NO: 26147 - RNA, 20 nt, Artificial Sequence
  HTT spacer sequence GTCN PAM
cugagaggucagaguguuug

SEQ ID NO: 26148 - RNA, 20 nt, Artificial Sequence
  HTT spacer sequence GTCN PAM
gaguguuuguguguguguca

SEQ ID NO: 26149 - RNA, 20 nt, Artificial Sequence
  HTT spacer sequence GTCN PAM
aagaggguugcauugugccc

SEQ ID NO: 26150 - RNA, 20 nt, Artificial Sequence
  HTT spacer sequence GTCN PAM
gagggugccucgcgugugug

SEQ ID NO: 26151 - RNA, 20 nt, Artificial Sequence
  HTT spacer sequence GTCN PAM
cugaggggucagagugugcc

SEQ ID NO: 26152 - RNA, 20 nt, Artificial Sequence
  HTT spacer sequence GTCN PAM
gagugugccugugugugugc

SEQ ID NO: 26153 - RNA, 20 nt, Artificial Sequence
  HTT spacer sequence GTCN PAM
cugaggggucagagugugcc

SEQ ID NO: 26154 - RNA, 20 nt, Artificial Sequence
  HTT spacer sequence GTCN PAM
gagugugccucugugugugu

SEQ ID NO: 26155 - RNA, 20 nt, Artificial Sequence
  HTT spacer sequence GTCN PAM
cugaggggucagagugugcc

SEQ ID NO: 26156 - RNA, 20 nt, Artificial Sequence
  HTT spacer sequence GTCN PAM
gagugugccucugugugugc

SEQ ID NO: 26157 - RNA, 20 nt, Artificial Sequence
  HTT spacer sequence GTCN PAM
cugagggggucagagugugc

SEQ ID NO: 26158 - RNA, 20 nt, Artificial Sequence
  HTT spacer sequence GTCN PAM
gagugugccucugugugugu

SEQ ID NO: 26159 - RNA, 20 nt, Artificial Sequence
  HTT spacer sequence GTCN PAM
cugagggggucagagugugc

SEQ ID NO: 26160 - RNA, 20 nt, Artificial Sequence
  HTT spacer sequence GTCN PAM
gagugugccucugugugugu

SEQ ID NO: 26161 - RNA, 20 nt, Artificial Sequence
  HTT spacer sequence GTCN PAM
cugaggggucaguguuccua

SEQ ID NO: 26162 - RNA, 20 nt, Artificial Sequence
  HTT spacer sequence GTCN PAM
guguuccuaugugcucauga

SEQ ID NO: 26163 - RNA, 20 nt, Artificial Sequence
  HTT spacer sequence GTCN PAM
ugagcacauaggaacacuga

SEQ ID NO: 26164 - RNA, 20 nt, Artificial Sequence
  HTT spacer sequence GTCN PAM
gagugugccugugugccaau

SEQ ID NO: 26165 - RNA, 20 nt, Artificial Sequence
  HTT spacer sequence GTCN PAM
uaguagaccaguuaauuuau

SEQ ID NO: 26166 - RNA, 20 nt, Artificial Sequence
  HTT spacer sequence GTCN PAM
acuaugaccacauauaaaaa

SEQ ID NO: 26167 - RNA, 20 nt, Artificial Sequence
  HTT spacer sequence GTCN PAM
aaauaaauuaacuggucuac

SEQ ID NO: 26168 - RNA, 20 nt, Artificial Sequence
  HTT spacer sequence GTCN PAM
aacacaggagucaaaauaaa

SEQ ID NO: 26169 - RNA, 20 nt, Artificial Sequence
  HTT spacer sequence GTCN PAM
uauuuuggucuaacacagga

SEQ ID NO: 26170 - RNA, 20 nt, Artificial Sequence
  HTT spacer sequence GTCN PAM
cuuaucuaucuaaugacaga

SEQ ID NO: 26171 - RNA, 20 nt, Artificial Sequence
  HTT spacer sequence GTCN PAM
uuagauagauaagggacuuu

SEQ ID NO: 26172 - RNA, 20 nt, Artificial Sequence
  HTT spacer sequence GTCN PAM
aagccacuggauuauuaugc

SEQ ID NO: 26173 - RNA, 20 nt, Artificial Sequence
  HTT spacer sequence GTCN PAM
uuauugucuuuucagaugaa

SEQ ID NO: 26174 - RNA, 20 nt, Artificial Sequence
  HTT spacer sequence GTCN PAM
uuucagaugaaucaaguaga

SEQ ID NO: 26175 - RNA, 20 nt, Artificial Sequence
  HTT spacer sequence GTCN PAM
caagaauaaucuacuugauu

SEQ ID NO: 26176 - RNA, 20 nt, Artificial Sequence
  HTT spacer sequence GTCN PAM
auuugaaaaugauaaaacuu

SEQ ID NO: 26177 - RNA, 20 nt, Artificial Sequence
  HTT spacer sequence GTCN PAM
ccuuuuuucagaaguggugu

SEQ ID NO: 26178 - RNA, 20 nt, Artificial Sequence
  HTT spacer sequence GTCN PAM
ucacaaaaugaucaguguuc

SEQ ID NO: 26179 - RNA, 20 nt, Artificial Sequence
  HTT spacer sequence GTCN PAM
aagcucuuccucugaacacu

SEQ ID NO: 26180 - RNA, 20 nt, Artificial Sequence
  HTT spacer sequence GTCN PAM
ccacagccauaccggcucug

SEQ ID NO: 26181 - RNA, 20 nt, Artificial Sequence
  HTT spacer sequence GTCN PAM
acgaccucuuuguauuaaga

SEQ ID NO: 26182 - RNA, 20 nt, Artificial Sequence
  HTT spacer sequence GTCN PAM
uggacuaugggcugcagagc

SEQ ID NO: 26183 - RNA, 20 nt, Artificial Sequence
  HTT spacer sequence GTCN PAM
auguuacugagacucaucca

SEQ ID NO: 26184 - RNA, 20 nt, Artificial Sequence
  HTT spacer sequence GTCN PAM
caguaacauugacaccacca

SEQ ID NO: 26185 - RNA, 20 nt, Artificial Sequence
  HTT spacer sequence GTCN PAM
uggauacuuuauugacccgu

SEQ ID NO: 26186 - RNA, 20 nt, Artificial Sequence
  HTT spacer sequence GTCN PAM
auaaaguauccacgacaguu

SEQ ID NO: 26187 - RNA, 20 nt, Artificial Sequence
  HTT spacer sequence GTCN PAM
cucuccgucgcccaggcugg

SEQ ID NO: 26188 - RNA, 20 nt, Artificial Sequence
  HTT spacer sequence GTCN PAM
cccaggcuggaguguggugg

SEQ ID NO: 26189 - RNA, 20 nt, Artificial Sequence
  HTT spacer sequence GTCN PAM
ggaguucgaaacagcuuggc

SEQ ID NO: 26190 - RNA, 20 nt, Artificial Sequence
  HTT spacer sequence GTCN PAM
ggugaacuccuguggcugug

SEQ ID NO: 26191 - RNA, 20 nt, Artificial Sequence
  HTT spacer sequence GTCN PAM
gagagucacgagaucguuca

SEQ ID NO: 26192 - RNA, 20 nt, Artificial Sequence
  HTT spacer sequence GTCN PAM
cgagaucguucaagauagug

SEQ ID NO: 26193 - RNA, 20 nt, Artificial Sequence
  HTT spacer sequence GTCN PAM
ucguuuuggaaaagagggcc

SEQ ID NO: 26194 - RNA, 20 nt, Artificial Sequence
  HTT spacer sequence GTCN PAM
auugauuuuugguccucguu

SEQ ID NO: 26195 - RNA, 20 nt, Artificial Sequence
  HTT spacer sequence GTCN PAM
agaugguagaaaccuuaaaa

SEQ ID NO: 26196 - RNA, 20 nt, Artificial Sequence
  HTT spacer sequence GTCN PAM
aaauagugguaaauaaauau

SEQ ID NO: 26197 - RNA, 20 nt, Artificial Sequence
  HTT spacer sequence GTCN PAM
uuuucuuugagcugauuucu

SEQ ID NO: 26198 - RNA, 20 nt, Artificial Sequence
  HTT spacer sequence GTCN PAM
uugaauucuuaugccacuuu

SEQ ID NO: 26199 - RNA, 20 nt, Artificial Sequence
  HTT spacer sequence GTCN PAM
uuuaaaaagagagauuucug

SEQ ID NO: 26200 - RNA, 20 nt, Artificial Sequence
  HTT spacer sequence GTCN PAM
agcccucacuuauuuuguca

SEQ ID NO: 26201 - RNA, 20 nt, Artificial Sequence
  HTT spacer sequence GTCN PAM
auucuuuuuagcuguuuguc

SEQ ID NO: 26202 - RNA, 20 nt, Artificial Sequence
  HTT spacer sequence GTCN PAM
uugaaucuucauaaagccau

SEQ ID NO: 26203 - RNA, 20 nt, Artificial Sequence
  HTT spacer sequence GTCN PAM
gaaaaugagcaacuggcaag

SEQ ID NO: 26204 - RNA, 20 nt, Artificial Sequence
  HTT spacer sequence GTCN PAM
uggagaggaguucaucagcc

SEQ ID NO: 26205 - RNA, 20 nt, Artificial Sequence
  HTT spacer sequence GTCN PAM
guuuagaaaugaucacuaau

SEQ ID NO: 26206 - RNA, 20 nt, Artificial Sequence
  HTT spacer sequence GTCN PAM
acaaaggcaaugagccaccu

SEQ ID NO: 26207 - RNA, 20 nt, Artificial Sequence
  HTT spacer sequence GTCN PAM
aggcuguguuugaaguuugc

SEQ ID NO: 26208 - RNA, 20 nt, Artificial Sequence
  HTT spacer sequence GTCN PAM
uagaguggggguugcauuag

SEQ ID NO: 26209 - RNA, 20 nt, Artificial Sequence
  HTT spacer sequence GTCN PAM
cccuguccucgcugggauca

SEQ ID NO: 26210 - RNA, 20 nt, Artificial Sequence
  HTT spacer sequence GTCN PAM
ucgcugggaucacaucuguu

SEQ ID NO: 26211 - RNA, 20 nt, Artificial Sequence
  HTT spacer sequence GTCN PAM
uccagcugaacugggacaag

SEQ ID NO: 26212 - RNA, 20 nt, Artificial Sequence
  HTT spacer sequence GTCN PAM
caguucagcuggaagacucu

SEQ ID NO: 26213 - RNA, 20 nt, Artificial Sequence
  HTT spacer sequence GTCN PAM
guuauacuugucccaguuca

SEQ ID NO: 26214 - RNA, 20 nt, Artificial Sequence
  HTT spacer sequence GTCN PAM
gucuguuauacuugucccag

SEQ ID NO: 26215 - RNA, 20 nt, Artificial Sequence
  HTT spacer sequence GTCN PAM
cuuggcagcagacuuucuaa

SEQ ID NO: 26216 - RNA, 20 nt, Artificial Sequence
  HTT spacer sequence GTCN PAM
gcugccaagagacgccuuuc

SEQ ID NO: 26217 - RNA, 20 nt, Artificial Sequence
  HTT spacer sequence GTCN PAM
ugcagcagugccacaaggag

SEQ ID NO: 26218 - RNA, 20 nt, Artificial Sequence
  HTT spacer sequence GTCN PAM
ucauucuccuuguggcacug

SEQ ID NO: 26219 - RNA, 20 nt, Artificial Sequence
  HTT spacer sequence GTCN PAM
cuuccacuugucuucauucu

SEQ ID NO: 26220 - RNA, 20 nt, Artificial Sequence
  HTT spacer sequence GTCN PAM
cgacagauagcugacaucau

SEQ ID NO: 26221 - RNA, 20 nt, Artificial Sequence
  HTT spacer sequence GTCN PAM
agacagucgcuuccacuugu

SEQ ID NO: 26222 - RNA, 20 nt, Artificial Sequence
  HTT spacer sequence GTCN PAM
gcuaucugucgagacagucg

SEQ ID NO: 26223 - RNA, 20 nt, Artificial Sequence
  HTT spacer sequence GTCN PAM
ccgcagccuuggcuuguugu

SEQ ID NO: 26224 - RNA, 20 nt, Artificial Sequence
  HTT spacer sequence GTCN PAM
uugugaaagguggguggcug

SEQ ID NO: 26225 - RNA, 20 nt, Artificial Sequence
  HTT spacer sequence GTCN PAM
uaaucugugccuugauagca

SEQ ID NO: 26226 - RNA, 20 nt, Artificial Sequence
  HTT spacer sequence GTCN PAM
ugggacagcugacuucauuu

SEQ ID NO: 26227 - RNA, 20 nt, Artificial Sequence
  HTT spacer sequence GTCN PAM
caugacuagcacggagaacu

SEQ ID NO: 26228 - RNA, 20 nt, Artificial Sequence
  HTT spacer sequence GTCN PAM
gcugucccaugacuagcacg

SEQ ID NO: 26229 - RNA, 20 nt, Artificial Sequence
  HTT spacer sequence GTCN PAM
acccaguguuuuauuuggug

SEQ ID NO: 26230 - RNA, 20 nt, Artificial Sequence
  HTT spacer sequence GTCN PAM
gaaaggaaaggaagggaaag

SEQ ID NO: 26231 - RNA, 20 nt, Artificial Sequence
  HTT spacer sequence GTCN PAM
cacucugucacccaggcuag

SEQ ID NO: 26232 - RNA, 20 nt, Artificial Sequence
  HTT spacer sequence GTCN PAM
cccaggcuagagugcagucg

SEQ ID NO: 26233 - RNA, 20 nt, Artificial Sequence
  HTT spacer sequence GTCN PAM
uguaaucucacugcaacaac

SEQ ID NO: 26234 - RNA, 20 nt, Artificial Sequence
  HTT spacer sequence GTCN PAM
uugcuacucaggaggcugag

SEQ ID NO: 26235 - RNA, 20 nt, Artificial Sequence
  HTT spacer sequence GTCN PAM
cgcuguguugcccaggcugg

SEQ ID NO: 26236 - RNA, 20 nt, Artificial Sequence
  HTT spacer sequence GTCN PAM
uuugaucauagaaauucuga

SEQ ID NO: 26237 - RNA, 20 nt, Artificial Sequence
  HTT spacer sequence GTCN PAM
ggcacaggccacugugcccc

SEQ ID NO: 26238 - RNA, 20 nt, Artificial Sequence
  HTT spacer sequence GTCN PAM
ccaccacccuucucugugag

SEQ ID NO: 26239 - RNA, 20 nt, Artificial Sequence
  HTT spacer sequence GTCN PAM
acuuaaaaggcaaccucaag

SEQ ID NO: 26240 - RNA, 20 nt, Artificial Sequence
  HTT spacer sequence GTCN PAM
gugguuuuuggcauuugauu

SEQ ID NO: 26241 - RNA, 20 nt, Artificial Sequence
  HTT spacer sequence GTCN PAM
ugaaggcaguaacaucaaua

SEQ ID NO: 26242 - RNA, 20 nt, Artificial Sequence
  HTT spacer sequence GTCN PAM
caagauaacauuccauuaug

SEQ ID NO: 26243 - RNA, 20 nt, Artificial Sequence
  HTT spacer sequence GTCN PAM
aacuggucucaagauaacau

SEQ ID NO: 26244 - RNA, 20 nt, Artificial Sequence
  HTT spacer sequence GTCN PAM
uguugucuaacuggucucaa

SEQ ID NO: 26245 - RNA, 20 nt, Artificial Sequence
  HTT spacer sequence GTCN PAM
aucucaccagaagccaagau

SEQ ID NO: 26246 - RNA, 20 nt, Artificial Sequence
  HTT spacer sequence GTCN PAM
gggucucccugccuacagau

SEQ ID NO: 26247 - RNA, 20 nt, Artificial Sequence
  HTT spacer sequence GTCN PAM
cccugccuacagaugguuuu

SEQ ID NO: 26248 - RNA, 20 nt, Artificial Sequence
  HTT spacer sequence GTCN PAM
gguauuuacuauguauucag

SEQ ID NO: 26249 - RNA, 20 nt, Artificial Sequence
  HTT spacer sequence GTCN PAM
uucuuuaaucugcuuugauc

SEQ ID NO: 26250 - RNA, 20 nt, Artificial Sequence
  HTT spacer sequence GTCN PAM
ccuuacccgcaucccaacaa

SEQ ID NO: 26251 - RNA, 20 nt, Artificial Sequence
  HTT spacer sequence GTCN PAM
guccccuuacccgcauccca

SEQ ID NO: 26252 - RNA, 20 nt, Artificial Sequence
  HTT spacer sequence GTCN PAM
auaccauggcggcugaucag

SEQ ID NO: 26253 - RNA, 20 nt, Artificial Sequence
  HTT spacer sequence GTCN PAM
gcggugggaguggcauuguu

SEQ ID NO: 26254 - RNA, 20 nt, Artificial Sequence
  HTT spacer sequence GTCN PAM
ccagaucaccaaagcuucuu

SEQ ID NO: 26255 - RNA, 20 nt, Artificial Sequence
  HTT spacer sequence GTCN PAM
gccccccgccagggccuuug

SEQ ID NO: 26256 - RNA, 20 nt, Artificial Sequence
  HTT spacer sequence GTCN PAM
cacauggguggcccugcucu

SEQ ID NO: 26257 - RNA, 20 nt, Artificial Sequence
  HTT spacer sequence GTCN PAM
gcaucccuuggcagcaugaa

SEQ ID NO: 26258 - RNA, 20 nt, Artificial Sequence
  HTT spacer sequence GTCN PAM
ucacccugaaaucaccccca

SEQ ID NO: 26259 - RNA, 20 nt, Artificial Sequence
  HTT spacer sequence GTCN PAM
acagccacccuguccucacc

SEQ ID NO: 26260 - RNA, 20 nt, Artificial Sequence
  HTT spacer sequence GTCN PAM
gcccuaccuuguccacagcc

SEQ ID NO: 26261 - RNA, 20 nt, Artificial Sequence
  HTT spacer sequence GTCN PAM
gagccugucuggauguagca

SEQ ID NO: 26262 - RNA, 20 nt, Artificial Sequence
  HTT spacer sequence GTCN PAM
ggauguagcaguugagaccc

SEQ ID NO: 26263 - RNA, 20 nt, Artificial Sequence
  HTT spacer sequence GTCN PAM
caacugcuacauccagacag

SEQ ID NO: 26264 - RNA, 20 nt, Artificial Sequence
  HTT spacer sequence GTCN PAM
agagacuguggggcaggggg

SEQ ID NO: 26265 - RNA, 20 nt, Artificial Sequence
  HTT spacer sequence GTCN PAM
cucgacaacuccaggcucau

SEQ ID NO: 26266 - RNA, 20 nt, Artificial Sequence
  HTT spacer sequence GTCN PAM
gcaucugagauguccacuca

SEQ ID NO: 26267 - RNA, 20 nt, Artificial Sequence
  HTT spacer sequence GTCN PAM
acucacaguggacccagacu

SEQ ID NO: 26268 - RNA, 20 nt, Artificial Sequence
  HTT spacer sequence GTCN PAM
acugugaguggacaucucag

SEQ ID NO: 26269 - RNA, 20 nt, Artificial Sequence
  HTT spacer sequence GTCN PAM
ggguccacugugaguggaca

SEQ ID NO: 26270 - RNA, 20 nt, Artificial Sequence
  HTT spacer sequence GTCN PAM
cagcuccaaggucagguagg

SEQ ID NO: 26271 - RNA, 20 nt, Artificial Sequence
  HTT spacer sequence GTCN PAM
gguaggugaggggagccagu

SEQ ID NO: 26272 - RNA, 20 nt, Artificial Sequence
  HTT spacer sequence GTCN PAM
cccuccugcacaaaaugccu

SEQ ID NO: 26273 - RNA, 20 nt, Artificial Sequence
  HTT spacer sequence GTCN PAM
gcaccuugggaacuuggccc

SEQ ID NO: 26274 - RNA, 20 nt, Artificial Sequence
  HTT spacer sequence GTCN PAM
uuucaggaacacauucccau

SEQ ID NO: 26275 - RNA, 20 nt, Artificial Sequence
  HTT spacer sequence GTCN PAM
cucuccuguccuuucaggaa

SEQ ID NO: 26276 - RNA, 20 nt, Artificial Sequence
  HTT spacer sequence GTCN PAM
gcaauggguuaaguuggcag

SEQ ID NO: 26277 - RNA, 20 nt, Artificial Sequence
  HTT spacer sequence GTCN PAM
ugaacugauccucccuguug

SEQ ID NO: 26278 - RNA, 20 nt, Artificial Sequence
  HTT spacer sequence GTCN PAM
ccugugucaugaacugaucc

SEQ ID NO: 26279 - RNA, 20 nt, Artificial Sequence
  HTT spacer sequence GTCN PAM
gugaacaccacaacggcgau

SEQ ID NO: 26280 - RNA, 20 nt, Artificial Sequence
  HTT spacer sequence GTCN PAM
uccaugcagccaauccuaac

SEQ ID NO: 26281 - RNA, 20 nt, Artificial Sequence
  HTT spacer sequence GTCN PAM
aggaugcaggaauccuggag

SEQ ID NO: 26282 - RNA, 20 nt, Artificial Sequence
  HTT spacer sequence GTCN PAM
guuguucccuuguuguaaga

SEQ ID NO: 26283 - RNA, 20 nt, Artificial Sequence
  HTT spacer sequence GTCN PAM
gugcccaccaucaauaagua

SEQ ID NO: 26284 - RNA, 20 nt, Artificial Sequence
  HTT spacer sequence GTCN PAM
aagcuuauaccacagugugu

SEQ ID NO: 26285 - RNA, 20 nt, Artificial Sequence
  HTT spacer sequence GTCN PAM
caaacuccugagcucaagca

SEQ ID NO: 26286 - RNA, 20 nt, Artificial Sequence
  HTT spacer sequence GTCN PAM
cuacuagaaauacaaaaagu

SEQ ID NO: 26287 - RNA, 20 nt, Artificial Sequence
  HTT spacer sequence GTCN PAM
uggcuaacucaggaggcuga

SEQ ID NO: 26288 - RNA, 20 nt, Artificial Sequence
  HTT spacer sequence GTCN PAM
cacucugugccccaggagug

SEQ ID NO: 26289 - RNA, 20 nt, Artificial Sequence
  HTT spacer sequence GTCN PAM
cugcucuucucacuuaaccc

SEQ ID NO: 26290 - RNA, 20 nt, Artificial Sequence
  HTT spacer sequence GTCN PAM
cuuuguauacacauacaugg

SEQ ID NO: 26291 - RNA, 20 nt, Artificial Sequence
  HTT spacer sequence GTCN PAM
uccaagcgucccuuuguaua

SEQ ID NO: 26292 - RNA, 20 nt, Artificial Sequence
  HTT spacer sequence GTCN PAM
ccaaaauguugguaaugauu

SEQ ID NO: 26293 - RNA, 20 nt, Artificial Sequence
  HTT spacer sequence GTCN PAM
gggugcugcagugcuaguug

SEQ ID NO: 26294 - RNA, 20 nt, Artificial Sequence
  HTT spacer sequence GTCN PAM
uuuacagaaagcauuuauua

SEQ ID NO: 26295 - RNA, 20 nt, Artificial Sequence
  HTT spacer sequence GTCN PAM
uuuagauuuuuauuacauaa

SEQ ID NO: 26296 - RNA, 20 nt, Artificial Sequence
  HTT spacer sequence GTCN PAM
ccuucccucauuuaaaagca

SEQ ID NO: 26297 - RNA, 20 nt, Artificial Sequence
  HTT spacer sequence GTCN PAM
uuucuuuuggcuuacguaga

SEQ ID NO: 26298 - RNA, 20 nt, Artificial Sequence
  HTT spacer sequence GTCN PAM
aauuccacagaugcacauug

SEQ ID NO: 26299 - RNA, 20 nt, Artificial Sequence
  HTT spacer sequence GTCN PAM
augugcaucuguggaauuag

SEQ ID NO: 26300 - RNA, 20 nt, Artificial Sequence
  HTT spacer sequence GTCN PAM
gguagacaugcuuuuacgga

SEQ ID NO: 26301 - RNA, 20 nt, Artificial Sequence
  HTT spacer sequence GTCN PAM
accggacggagggaggaagg

SEQ ID NO: 26302 - RNA, 20 nt, Artificial Sequence
  HTT spacer sequence GTCN PAM
cuccaaacacaauggugagu

SEQ ID NO: 26303 - RNA, 20 nt, Artificial Sequence
  HTT spacer sequence GTCN PAM
cucgccuggcucagcagaug

SEQ ID NO: 26304 - RNA, 20 nt, Artificial Sequence
  HTT spacer sequence GTCN PAM
agauucaucugcugagccag

SEQ ID NO: 26305 - RNA, 20 nt, Artificial Sequence
  HTT spacer sequence GTCN PAM
caguaaucagagccugaaca

SEQ ID NO: 26306 - RNA, 20 nt, Artificial Sequence
  HTT spacer sequence GTCN PAM
gagucagucaguuuggguag

SEQ ID NO: 26307 - RNA, 20 nt, Artificial Sequence
  HTT spacer sequence GTCN PAM
gucaguuuggguagggcuuc

SEQ ID NO: 26308 - RNA, 20 nt, Artificial Sequence
  HTT spacer sequence GTCN PAM
guuuggguagggcuucuuga

SEQ ID NO: 26309 - RNA, 20 nt, Artificial Sequence
  HTT spacer sequence GTCN PAM
cacucugucgcccaggcugg

SEQ ID NO: 26310 - RNA, 20 nt, Artificial Sequence
  HTT spacer sequence GTCN PAM
cccaggcuggaguacagugu

SEQ ID NO: 26311 - RNA, 20 nt, Artificial Sequence
  HTT spacer sequence GTCN PAM
ugaucucggcucacugcaag

SEQ ID NO: 26312 - RNA, 20 nt, Artificial Sequence
  HTT spacer sequence GTCN PAM
cagcaacucgggaggcugag

SEQ ID NO: 26313 - RNA, 20 nt, Artificial Sequence
  HTT spacer sequence GTCN PAM
ugaucuccugaccucgugac

SEQ ID NO: 26314 - RNA, 20 nt, Artificial Sequence
  HTT spacer sequence GTCN PAM
ggagaucaagaccauccugg

SEQ ID NO: 26315 - RNA, 20 nt, Artificial Sequence
  HTT spacer sequence GTCN PAM
cgaggucaggagaucaagac

SEQ ID NO: 26316 - RNA, 20 nt, Artificial Sequence
  HTT spacer sequence GTCN PAM
cccaggcuggaguacagugg

SEQ ID NO: 26317 - RNA, 20 nt, Artificial Sequence
  HTT spacer sequence GTCN PAM
agguagcgccacuguacucc

SEQ ID NO: 26318 - RNA, 20 nt, Artificial Sequence
  HTT spacer sequence GTCN PAM
cagcuacucgggaggcugag

SEQ ID NO: 26319 - RNA, 20 nt, Artificial Sequence
  HTT spacer sequence GTCN PAM
cuacuaaaaauacaaaaaau

SEQ ID NO: 26320 - RNA, 20 nt, Artificial Sequence
  HTT spacer sequence GTCN PAM
cgaucuccugaccuugugau

SEQ ID NO: 26321 - RNA, 20 nt, Artificial Sequence
  HTT spacer sequence GTCN PAM
ggagaucgcgaccauccugg

SEQ ID NO: 26322 - RNA, 20 nt, Artificial Sequence
  HTT spacer sequence GTCN PAM
caaagugugcucccagaaaa

SEQ ID NO: 26323 - RNA, 20 nt, Artificial Sequence
  HTT spacer sequence GTCN PAM
cagcugaagaaaaaaggaag

SEQ ID NO: 26324 - RNA, 20 nt, Artificial Sequence
  HTT spacer sequence GTCN PAM
gugagcacuguucaacugug

SEQ ID NO: 26325 - RNA, 20 nt, Artificial Sequence
  HTT spacer sequence GTCN PAM
acugaagauauuguucuuuc

SEQ ID NO: 26326 - RNA, 20 nt, Artificial Sequence
  HTT spacer sequence GTCN PAM
ccaucucuuaaccuauuaau

SEQ ID NO: 26327 - RNA, 20 nt, Artificial Sequence
  HTT spacer sequence GTCN PAM
cgugauguuucacagucagu

SEQ ID NO: 26328 - RNA, 20 nt, Artificial Sequence
  HTT spacer sequence GTCN PAM
guaagucuggaauaauaccu

SEQ ID NO: 26329 - RNA, 20 nt, Artificial Sequence
  HTT spacer sequence GTCN PAM
ggaauaauaccuggucuugc

SEQ ID NO: 26330 - RNA, 20 nt, Artificial Sequence
  HTT spacer sequence GTCN PAM
ugcuucacuucugaguuggg

SEQ ID NO: 26331 - RNA, 20 nt, Artificial Sequence
  HTT spacer sequence GTCN PAM
guaucaguguaauuuucuaa

SEQ ID NO: 26332 - RNA, 20 nt, Artificial Sequence
  HTT spacer sequence GTCN PAM
ugcauuaucuauggcucuug

SEQ ID NO: 26333 - RNA, 20 nt, Artificial Sequence
  HTT spacer sequence GTCN PAM
ugaaguucugucauguucug

SEQ ID NO: 26334 - RNA, 20 nt, Artificial Sequence
  HTT spacer sequence GTCN PAM
uguucugucucuuguccuca

SEQ ID NO: 26335 - RNA, 20 nt, Artificial Sequence
  HTT spacer sequence GTCN PAM
cuuguccucaguagagaugc

SEQ ID NO: 26336 - RNA, 20 nt, Artificial Sequence
  HTT spacer sequence GTCN PAM
ucaguagagaugcuacagca

SEQ ID NO: 26337 - RNA, 20 nt, Artificial Sequence
  HTT spacer sequence GTCN PAM
ugggggcaggcaguaggggc

SEQ ID NO: 26338 - RNA, 20 nt, Artificial Sequence
  HTT spacer sequence GTCN PAM
gcgugccccuacugccugcc

SEQ ID NO: 26339 - RNA, 20 nt, Artificial Sequence
  HTT spacer sequence GTCN PAM
gggaaguugaaacccaagag

SEQ ID NO: 26340 - RNA, 20 nt, Artificial Sequence
  HTT spacer sequence GTCN PAM
cagauugucaccaugugcug

SEQ ID NO: 26341 - RNA, 20 nt, Artificial Sequence
  HTT spacer sequence GTCN PAM
ccaugugcuggcaguuuuac

SEQ ID NO: 26342 - RNA, 20 nt, Artificial Sequence
  HTT spacer sequence GTCN PAM
guaauaaaagucuucucccu

SEQ ID NO: 26343 - RNA, 20 nt, Artificial Sequence
  HTT spacer sequence GTCN PAM
ucucccugcagggcagccug

SEQ ID NO: 26344 - RNA, 20 nt, Artificial Sequence
  HTT spacer sequence GTCN PAM
ucccucauaaauuguuugga

SEQ ID NO: 26345 - RNA, 20 nt, Artificial Sequence
  HTT spacer sequence GTCN PAM
uuggggagcuuccaaacaau

SEQ ID NO: 26346 - RNA, 20 nt, Artificial Sequence
  HTT spacer sequence GTCN PAM
cucuccaccuuugcuagauu

SEQ ID NO: 26347 - RNA, 20 nt, Artificial Sequence
  HTT spacer sequence GTCN PAM
cagccacuuagcagaagcag

SEQ ID NO: 26348 - RNA, 20 nt, Artificial Sequence
  HTT spacer sequence GTCN PAM
ucaguggagaugcccugugu

SEQ ID NO: 26349 - RNA, 20 nt, Artificial Sequence
  HTT spacer sequence GTCN PAM
aaggagauaagcccaguaag

SEQ ID NO: 26350 - RNA, 20 nt, Artificial Sequence
  HTT spacer sequence GTCN PAM
cauugaagcagcuggcuaaa

SEQ ID NO: 26351 - RNA, 20 nt, Artificial Sequence
  HTT spacer sequence GTCN PAM
caggaauuuaauguaucauc

SEQ ID NO: 26352 - RNA, 20 nt, Artificial Sequence
  HTT spacer sequence GTCN PAM
cucuguguaucaccuuccuc

SEQ ID NO: 26353 - RNA, 20 nt, Artificial Sequence
  HTT spacer sequence GTCN PAM
cuuggucucucuguguauca

SEQ ID NO: 26354 - RNA, 20 nt, Artificial Sequence
  HTT spacer sequence GTCN PAM
acggcgacggcgcucugcau

SEQ ID NO: 26355 - RNA, 20 nt, Artificial Sequence
  HTT spacer sequence GTCN PAM
ccguggacacagucacuugg

SEQ ID NO: 26356 - RNA, 20 nt, Artificial Sequence
  HTT spacer sequence GTCN PAM
ccuaauucacugucaucuuu

SEQ ID NO: 26357 - RNA, 20 nt, Artificial Sequence
  HTT spacer sequence GTCN PAM
ucuuuuuuguuucuuggaag

SEQ ID NO: 26358 - RNA, 20 nt, Artificial Sequence
  HTT spacer sequence GTCN PAM
ucuaaaagaauaccaaccag

SEQ ID NO: 26359 - RNA, 20 nt, Artificial Sequence
  HTT spacer sequence GTCN PAM
gauccacaucuucaagucug

SEQ ID NO: 26360 - RNA, 20 nt, Artificial Sequence
  HTT spacer sequence GTCN PAM
gguaggugaaucacauuagu

SEQ ID NO: 26361 - RNA, 20 nt, Artificial Sequence
  HTT spacer sequence GTCN PAM
uccuggagugucucguuccc

SEQ ID NO: 26362 - RNA, 20 nt, Artificial Sequence
  HTT spacer sequence GTCN PAM
cguuccccauucugcacuau

SEQ ID NO: 26363 - RNA, 20 nt, Artificial Sequence
  HTT spacer sequence GTCN PAM
caugguaucagguguacucu

SEQ ID NO: 26364 - RNA, 20 nt, Artificial Sequence
  HTT spacer sequence GTCN PAM
cucgauggaugaauggauaa

SEQ ID NO: 26365 - RNA, 20 nt, Artificial Sequence
  HTT spacer sequence GTCN PAM
uuuuuuuaaggcugaauaau

SEQ ID NO: 26366 - RNA, 20 nt, Artificial Sequence
  HTT spacer sequence GTCN PAM
gaauguccuuuuuuuaaggc

SEQ ID NO: 26367 - RNA, 20 nt, Artificial Sequence
  HTT spacer sequence GTCN PAM
cccauguuguagcauguguc

SEQ ID NO: 26368 - RNA, 20 nt, Artificial Sequence
  HTT spacer sequence GTCN PAM
uuaagggucacccauguugu

SEQ ID NO: 26369 - RNA, 20 nt, Artificial Sequence
  HTT spacer sequence GTCN PAM
caaaaggacaaauacuaugu

SEQ ID NO: 26370 - RNA, 20 nt, Artificial Sequence
  HTT spacer sequence GTCN PAM
uuuugugacuggcuuauuuc

SEQ ID NO: 26371 - RNA, 20 nt, Artificial Sequence
  HTT spacer sequence GTCN PAM
cucauguaaguggaaucaca

SEQ ID NO: 26372 - RNA, 20 nt, Artificial Sequence
  HTT spacer sequence GTCN PAM
ucuuaacuauuuuuaacugu

SEQ ID NO: 26373 - RNA, 20 nt, Artificial Sequence
  HTT spacer sequence GTCN PAM
uggcucaugccugaaaucca

SEQ ID NO: 26374 - RNA, 20 nt, Artificial Sequence
  HTT spacer sequence GTCN PAM
caaacuccuuggcucaagca

SEQ ID NO: 26375 - RNA, 20 nt, Artificial Sequence
  HTT spacer sequence GTCN PAM
uaccauguugcugaggcugg

SEQ ID NO: 26376 - RNA, 20 nt, Artificial Sequence
  HTT spacer sequence GTCN PAM
cagcuacucaggagacugag

SEQ ID NO: 26377 - RNA, 20 nt, Artificial Sequence
  HTT spacer sequence GTCN PAM
ccugaguagcugggaccaca

SEQ ID NO: 26378 - RNA, 20 nt, Artificial Sequence
  HTT spacer sequence GTCN PAM
cuagugagauguguucaugc

SEQ ID NO: 26379 - RNA, 20 nt, Artificial Sequence
  HTT spacer sequence GTCN PAM
uacucuauagccgaggcugg

SEQ ID NO: 26380 - RNA, 20 nt, Artificial Sequence
  HTT spacer sequence GTCN PAM
uguuuuguuuuguuuuuuug

SEQ ID NO: 26381 - RNA, 20 nt, Artificial Sequence
  HTT spacer sequence GTCN PAM
agguaaaaggaucacuugaa

SEQ ID NO: 26382 - RNA, 20 nt, Artificial Sequence
  HTT spacer sequence GTCN PAM
caagcuccuggcuucaagug

SEQ ID NO: 26383 - RNA, 20 nt, Artificial Sequence
  HTT spacer sequence GTCN PAM
cgauauguugcucaggcugg

SEQ ID NO: 26384 - RNA, 20 nt, Artificial Sequence
  HTT spacer sequence GTCN PAM
cagcuacuugggaggcugag

SEQ ID NO: 26385 - RNA, 20 nt, Artificial Sequence
  HTT spacer sequence GTCN PAM
uugaucauuuguaaaaguaa

SEQ ID NO: 26386 - RNA, 20 nt, Artificial Sequence
  HTT spacer sequence GTCN PAM
caagcucaagcgaucacccc

SEQ ID NO: 26387 - RNA, 20 nt, Artificial Sequence
  HTT spacer sequence GTCN PAM
aggcuggucucaagcucaag

SEQ ID NO: 26388 - RNA, 20 nt, Artificial Sequence
  HTT spacer sequence GTCN PAM
cuugcuauguuguccaggcu

SEQ ID NO: 26389 - RNA, 20 nt, Artificial Sequence
  HTT spacer sequence GTCN PAM
agcuguagugagccaugauc

SEQ ID NO: 26390 - RNA, 20 nt, Artificial Sequence
  HTT spacer sequence GTCN PAM
cgaucucgcccaggcuggag

SEQ ID NO: 26391 - RNA, 20 nt, Artificial Sequence
  HTT spacer sequence GTCN PAM
cuagagaaagaaaaugacaa

SEQ ID NO: 26392 - RNA, 20 nt, Artificial Sequence
  HTT spacer sequence GTCN PAM
uuuucuuucucuagagacau

SEQ ID NO: 26393 - RNA, 20 nt, Artificial Sequence
  HTT spacer sequence GTCN PAM
uugucauuuucuuucucuag

SEQ ID NO: 26394 - RNA, 20 nt, Artificial Sequence
  HTT spacer sequence GTCN PAM
uaagaugccagcugugcagc

SEQ ID NO: 26395 - RNA, 20 nt, Artificial Sequence
  HTT spacer sequence GTCN PAM
aaauuaggacaguguguuuu

SEQ ID NO: 26396 - RNA, 20 nt, Artificial Sequence
  HTT spacer sequence GTCN PAM
uaauuuggacuggcugcuuu

SEQ ID NO: 26397 - RNA, 20 nt, Artificial Sequence
  HTT spacer sequence GTCN PAM
uuuauuuaaagcaaagcauu

SEQ ID NO: 26398 - RNA, 20 nt, Artificial Sequence
  HTT spacer sequence GTCN PAM
uucuucucucaagaaaauag

SEQ ID NO: 26399 - RNA, 20 nt, Artificial Sequence
  HTT spacer sequence GTCN PAM
ugguccaaauaugaggcaaa

SEQ ID NO: 26400 - RNA, 20 nt, Artificial Sequence
  HTT spacer sequence GTCN PAM
aaauaugaggcaaaccaaaa

SEQ ID NO: 26401 - RNA, 20 nt, Artificial Sequence
  HTT spacer sequence GTCN PAM
cgaucaaagaccuauagaaa

SEQ ID NO: 26402 - RNA, 20 nt, Artificial Sequence
  HTT spacer sequence GTCN PAM
uugaucgugacuccuaagcc

SEQ ID NO: 26403 - RNA, 20 nt, Artificial Sequence
  HTT spacer sequence GTCN PAM
uaauguaaauacugcuugag

SEQ ID NO: 26404 - RNA, 20 nt, Artificial Sequence
  HTT spacer sequence GTCN PAM
caaaaaaaaaaagaaagaaa

SEQ ID NO: 26405 - RNA, 20 nt, Artificial Sequence
  HTT spacer sequence GTCN PAM
cuacuaaaaauacaaaaaau

SEQ ID NO: 26406 - RNA, 20 nt, Artificial Sequence
  HTT spacer sequence GTCN PAM
cgaacuccugaccucaggug

SEQ ID NO: 26407 - RNA, 20 nt, Artificial Sequence
  HTT spacer sequence GTCN PAM
ggaguucgagaccagccuca

SEQ ID NO: 26408 - RNA, 20 nt, Artificial Sequence
  HTT spacer sequence GTCN PAM
uacauugauuucaaaaauga

SEQ ID NO: 26409 - RNA, 20 nt, Artificial Sequence
  HTT spacer sequence GTCN PAM
ucaguguuucagucauacau

SEQ ID NO: 26410 - RNA, 20 nt, Artificial Sequence
  HTT spacer sequence GTCN PAM
guaagucuucaguguuucag

SEQ ID NO: 26411 - RNA, 20 nt, Artificial Sequence
  HTT spacer sequence GTCN PAM
ucgguucugaugaauauaaa

SEQ ID NO: 26412 - RNA, 20 nt, Artificial Sequence
  HTT spacer sequence GTCN PAM
acuucagaugauguaaccau

SEQ ID NO: 26413 - RNA, 20 nt, Artificial Sequence
  HTT spacer sequence GTCN PAM
gucaacuucagaugauguaa

SEQ ID NO: 26414 - RNA, 20 nt, Artificial Sequence
  HTT spacer sequence GTCN PAM
ccaaauagaacuaaacaugu

SEQ ID NO: 26415 - RNA, 20 nt, Artificial Sequence
  HTT spacer sequence GTCN PAM
aaaguugucugaagucuaua

SEQ ID NO: 26416 - RNA, 20 nt, Artificial Sequence
  HTT spacer sequence GTCN PAM
gaagucuauaaaucaugaca

SEQ ID NO: 26417 - RNA, 20 nt, Artificial Sequence
  HTT spacer sequence GTCN PAM
auaaaucaugacaaauuaug

SEQ ID NO: 26418 - RNA, 20 nt, Artificial Sequence
  HTT spacer sequence GTCN PAM
ugauuuauagacuucagaca

SEQ ID NO: 26419 - RNA, 20 nt, Artificial Sequence
  HTT spacer sequence GTCN PAM
uucaguugcagggauaaaac

SEQ ID NO: 26420 - RNA, 20 nt, Artificial Sequence
  HTT spacer sequence GTCN PAM
uaccaacuacccuugccugc

SEQ ID NO: 26421 - RNA, 20 nt, Artificial Sequence
  HTT spacer sequence GTCN PAM
gcauuguauauuuaugcauc

SEQ ID NO: 26422 - RNA, 20 nt, Artificial Sequence
  HTT spacer sequence GTCN PAM
cacuuugucgccuaggcuga

SEQ ID NO: 26423 - RNA, 20 nt, Artificial Sequence
  HTT spacer sequence GTCN PAM
ccuaggcugaagugcagugg

SEQ ID NO: 26424 - RNA, 20 nt, Artificial Sequence
  HTT spacer sequence GTCN PAM
cagcuacuuagaaggcugag

SEQ ID NO: 26425 - RNA, 20 nt, Artificial Sequence
  HTT spacer sequence GTCN PAM
ugcuguguugcccaggcggg

SEQ ID NO: 26426 - RNA, 20 nt, Artificial Sequence
  HTT spacer sequence GTCN PAM
uuaacucuuagcuucaggcg

SEQ ID NO: 26427 - RNA, 20 nt, Artificial Sequence
  HTT spacer sequence GTCN PAM
cccaccacgcccagucucau

SEQ ID NO: 26428 - RNA, 20 nt, Artificial Sequence
  HTT spacer sequence GTCN PAM
caucucugcuuccuguguua

SEQ ID NO: 26429 - RNA, 20 nt, Artificial Sequence
  HTT spacer sequence GTCN PAM
ugugaaaacagcccaccaga

SEQ ID NO: 26430 - RNA, 20 nt, Artificial Sequence
  HTT spacer sequence GTCN PAM
ucuucggucaugugaaaaca

SEQ ID NO: 26431 - RNA, 20 nt, Artificial Sequence
  HTT spacer sequence GTCN PAM
cccauauuacucaugcaagg

SEQ ID NO: 26432 - RNA, 20 nt, Artificial Sequence
  HTT spacer sequence GTCN PAM
acaugggccaaaugggagac

SEQ ID NO: 26433 - RNA, 20 nt, Artificial Sequence
  HTT spacer sequence GTCN PAM
cccauuuggcccauguggac

SEQ ID NO: 26434 - RNA, 20 nt, Artificial Sequence
  HTT spacer sequence GTCN PAM
agucucccauuuggcccaug

SEQ ID NO: 26435 - RNA, 20 nt, Artificial Sequence
  HTT spacer sequence GTCN PAM
ccgggaguaagggagaggag

SEQ ID NO: 26436 - RNA, 20 nt, Artificial Sequence
  HTT spacer sequence GTCN PAM
gcugcaagggauagcagcac

SEQ ID NO: 26437 - RNA, 20 nt, Artificial Sequence
  HTT spacer sequence GTCN PAM
auuugaggauacucuuggcg

SEQ ID NO: 26438 - RNA, 20 nt, Artificial Sequence
  HTT spacer sequence GTCN PAM
gugcgucaguaucacaaguc

SEQ ID NO: 26439 - RNA, 20 nt, Artificial Sequence
  HTT spacer sequence GTCN PAM
guaucacaagucuugauauu

SEQ ID NO: 26440 - RNA, 20 nt, Artificial Sequence
  HTT spacer sequence GTCN PAM
ugauauuuccuaugaagaag

SEQ ID NO: 26441 - RNA, 20 nt, Artificial Sequence
  HTT spacer sequence GTCN PAM
cugcacuacuguucuucuuc

SEQ ID NO: 26442 - RNA, 20 nt, Artificial Sequence
  HTT spacer sequence GTCN PAM
gucacugcacuacuguucuu

SEQ ID NO: 26443 - RNA, 20 nt, Artificial Sequence
  HTT spacer sequence GTCN PAM
cccuccgcacaggccauggc

SEQ ID NO: 26444 - RNA, 20 nt, Artificial Sequence
  HTT spacer sequence GTCN PAM
acuaugaaaauuaaauuuug

SEQ ID NO: 26445 - RNA, 20 nt, Artificial Sequence
  HTT spacer sequence GTCN PAM
gugaagcauaauccgaagau

SEQ ID NO: 26446 - RNA, 20 nt, Artificial Sequence
  HTT spacer sequence GTCN PAM
auuuuaguauguuggucauu

SEQ ID NO: 26447 - RNA, 20 nt, Artificial Sequence
  HTT spacer sequence GTCN PAM
uuuuaauauuuugccaccag

SEQ ID NO: 26448 - RNA, 20 nt, Artificial Sequence
  HTT spacer sequence GTCN PAM
ccuccuggcaucaaauccaa

SEQ ID NO: 26449 - RNA, 20 nt, Artificial Sequence
  HTT spacer sequence GTCN PAM
uuagaaaugaggcugucucc

SEQ ID NO: 26450 - RNA, 20 nt, Artificial Sequence
  HTT spacer sequence GTCN PAM
ugccuuugugggauaagggu

SEQ ID NO: 26451 - RNA, 20 nt, Artificial Sequence
  HTT spacer sequence GTCN PAM
uucuacauguccgagcgauc

SEQ ID NO: 26452 - RNA, 20 nt, Artificial Sequence
  HTT spacer sequence GTCN PAM
gagcgaucucugugcagcuc

SEQ ID NO: 26453 - RNA, 20 nt, Artificial Sequence
  HTT spacer sequence GTCN PAM
cugucuuauugcgcugauuu

SEQ ID NO: 26454 - RNA, 20 nt, Artificial Sequence
  HTT spacer sequence GTCN PAM
uauugcgcugauuuccucuc

SEQ ID NO: 26455 - RNA, 20 nt, Artificial Sequence
  HTT spacer sequence GTCN PAM
aauaggacuuccagcagaga

SEQ ID NO: 26456 - RNA, 20 nt, Artificial Sequence
  HTT spacer sequence GTCN PAM
uauuggacaacacuucaaca

SEQ ID NO: 26457 - RNA, 20 nt, Artificial Sequence
  HTT spacer sequence GTCN PAM
cugcuggaaguccuauugga

SEQ ID NO: 26458 - RNA, 20 nt, Artificial Sequence
  HTT spacer sequence GTCN PAM
gcacugucuaauuuaguugc

SEQ ID NO: 26459 - RNA, 20 nt, Artificial Sequence
  HTT spacer sequence GTCN PAM
aauuuaguugccuuuagcca

SEQ ID NO: 26460 - RNA, 20 nt, Artificial Sequence
  HTT spacer sequence GTCN PAM
gauuggauagcuuaauuuau

SEQ ID NO: 26461 - RNA, 20 nt, Artificial Sequence
  HTT spacer sequence GTCN PAM
cauacaggagccacuaucca

SEQ ID NO: 26462 - RNA, 20 nt, Artificial Sequence
  HTT spacer sequence GTCN PAM
guugagaagcagcuuuacug

SEQ ID NO: 26463 - RNA, 20 nt, Artificial Sequence
  HTT spacer sequence GTCN PAM
aaagauaccagcaggaaacc

SEQ ID NO: 26464 - RNA, 20 nt, Artificial Sequence
  HTT spacer sequence GTCN PAM
ucuuguuuccuuugacugca

SEQ ID NO: 26465 - RNA, 20 nt, Artificial Sequence
  HTT spacer sequence GTCN PAM
aaggaaacaagaagacagaa

SEQ ID NO: 26466 - RNA, 20 nt, Artificial Sequence
  HTT spacer sequence GTCN PAM
uucaaauaaaugcagucaaa

SEQ ID NO: 26467 - RNA, 20 nt, Artificial Sequence
  HTT spacer sequence GTCN PAM
ucauuuucgguuuaugggug

SEQ ID NO: 26468 - RNA, 20 nt, Artificial Sequence
  HTT spacer sequence GTCN PAM
auuucaggcguggguacuuc

SEQ ID NO: 26469 - RNA, 20 nt, Artificial Sequence
  HTT spacer sequence GTCN PAM
gaauggcacccuugacuuuu

SEQ ID NO: 26470 - RNA, 20 nt, Artificial Sequence
  HTT spacer sequence GTCN PAM
agggugccauucugacuagu

SEQ ID NO: 26471 - RNA, 20 nt, Artificial Sequence
  HTT spacer sequence GTCN PAM
uccuguuuacaacauuuggg

SEQ ID NO: 26472 - RNA, 20 nt, Artificial Sequence
  HTT spacer sequence GTCN PAM
aagauagacugguuuagaaa

SEQ ID NO: 26473 - RNA, 20 nt, Artificial Sequence
  HTT spacer sequence GTCN PAM
aucuuggaccaaaagagagg

SEQ ID NO: 26474 - RNA, 20 nt, Artificial Sequence
  HTT spacer sequence GTCN PAM
auguggcugaauuagagcug

SEQ ID NO: 26475 - RNA, 20 nt, Artificial Sequence
  HTT spacer sequence GTCN PAM
ggccuuguagccucaacacg

SEQ ID NO: 26476 - RNA, 20 nt, Artificial Sequence
  HTT spacer sequence GTCN PAM
uugaaaaucacggugagcaa

SEQ ID NO: 26477 - RNA, 20 nt, Artificial Sequence
  HTT spacer sequence GTCN PAM
ggauggcaggcagggaagag

SEQ ID NO: 26478 - RNA, 20 nt, Artificial Sequence
  HTT spacer sequence GTCN PAM
ggguggcaggagcugcugcc

SEQ ID NO: 26479 - RNA, 20 nt, Artificial Sequence
  HTT spacer sequence GTCN PAM
uggucgugggugguggagau

SEQ ID NO: 26480 - RNA, 20 nt, Artificial Sequence
  HTT spacer sequence GTCN PAM
ugggugguggagaugugcca

SEQ ID NO: 26481 - RNA, 20 nt, Artificial Sequence
  HTT spacer sequence GTCN PAM
uggcacaucuccaccaccca

SEQ ID NO: 26482 - RNA, 20 nt, Artificial Sequence
  HTT spacer sequence GTCN PAM
ugcagccauccccucugcca

SEQ ID NO: 26483 - RNA, 20 nt, Artificial Sequence
  HTT spacer sequence GTCN PAM
uuuccaaagcgucugugguu

SEQ ID NO: 26484 - RNA, 20 nt, Artificial Sequence
  HTT spacer sequence GTCN PAM
gugguuccacuuuuuggggc

SEQ ID NO: 26485 - RNA, 20 nt, Artificial Sequence
  HTT spacer sequence GTCN PAM
uuucuauaguaauaaaguug

SEQ ID NO: 26486 - RNA, 20 nt, Artificial Sequence
  HTT spacer sequence GTCN PAM
acuuuauuacuauagaaagg

SEQ ID NO: 26487 - RNA, 20 nt, Artificial Sequence
  HTT spacer sequence GTCN PAM
uuuccccaagcaugaacuug

SEQ ID NO: 26488 - RNA, 20 nt, Artificial Sequence
  HTT spacer sequence GTCN PAM
cuguguggcguggagaagag

SEQ ID NO: 26489 - RNA, 20 nt, Artificial Sequence
  HTT spacer sequence GTCN PAM
uagcugaacaagcccagccc

SEQ ID NO: 26490 - RNA, 20 nt, Artificial Sequence
  HTT spacer sequence GTCN PAM
ccgggcacuuggucccuuuc

SEQ ID NO: 26491 - RNA, 20 nt, Artificial Sequence
  HTT spacer sequence GTCN PAM
cuuucucuuccccugagucc

SEQ ID NO: 26492 - RNA, 20 nt, Artificial Sequence
  HTT spacer sequence GTCN PAM
cuuuggcuccccugugccac

SEQ ID NO: 26493 - RNA, 20 nt, Artificial Sequence
  HTT spacer sequence GTCN PAM
cagacugcugcucaucacua

SEQ ID NO: 26494 - RNA, 20 nt, Artificial Sequence
  HTT spacer sequence GTCN PAM
gagacagaaagaaggcagag

SEQ ID NO: 26495 - RNA, 20 nt, Artificial Sequence
  HTT spacer sequence GTCN PAM
cgaguagugaugagcagcag

SEQ ID NO: 26496 - RNA, 20 nt, Artificial Sequence
  HTT spacer sequence GTCN PAM
uuguuagguaaugguagcua

SEQ ID NO: 26497 - RNA, 20 nt, Artificial Sequence
  HTT spacer sequence GTCN PAM
uaaaaccaagaaacaaccuu

SEQ ID NO: 26498 - RNA, 20 nt, Artificial Sequence
  HTT spacer sequence GTCN PAM
ccgaauucccacauggagga

SEQ ID NO: 26499 - RNA, 20 nt, Artificial Sequence
  HTT spacer sequence GTCN PAM
gguuggggacaaggagaggg

SEQ ID NO: 26500 - RNA, 20 nt, Artificial Sequence
  HTT spacer sequence GTCN PAM
ccaaccagacacagaggaug

SEQ ID NO: 26501 - RNA, 20 nt, Artificial Sequence
  HTT spacer sequence GTCN PAM
cuuauccaaggccacaaagc

SEQ ID NO: 26502 - RNA, 20 nt, Artificial Sequence
  HTT spacer sequence GTCN PAM
ccacgagagaacaccagcaa

SEQ ID NO: 26503 - RNA, 20 nt, Artificial Sequence
  HTT spacer sequence GTCN PAM
cagccccacccuguaaaagg

SEQ ID NO: 26504 - RNA, 20 nt, Artificial Sequence
  HTT spacer sequence GTCN PAM
ccuuuuacaggguggggcug

SEQ ID NO: 26505 - RNA, 20 nt, Artificial Sequence
  HTT spacer sequence GTCN PAM
cucaguccccuuuuacaggg

SEQ ID NO: 26506 - RNA, 20 nt, Artificial Sequence
  HTT spacer sequence GTCN PAM
uccugcugcuucccagcagc

SEQ ID NO: 26507 - RNA, 20 nt, Artificial Sequence
  HTT spacer sequence GTCN PAM
ugcugcuucccagcagcagc

SEQ ID NO: 26508 - RNA, 20 nt, Artificial Sequence
  HTT spacer sequence GTCN PAM
cugauguguuuucugugagg

SEQ ID NO: 26509 - RNA, 20 nt, Artificial Sequence
  HTT spacer sequence GTCN PAM
gggaaacccuuggaaggagg

SEQ ID NO: 26510 - RNA, 20 nt, Artificial Sequence
  HTT spacer sequence GTCN PAM
ccuccuuccaaggguuuccc

SEQ ID NO: 26511 - RNA, 20 nt, Artificial Sequence
  HTT spacer sequence GTCN PAM
ccaugggauuagugguggcu

SEQ ID NO: 26512 - RNA, 20 nt, Artificial Sequence
  HTT spacer sequence GTCN PAM
gccuugcucuccgcagagag

SEQ ID NO: 26513 - RNA, 20 nt, Artificial Sequence
  HTT spacer sequence GTCN PAM
aguuguuccucccuccaccu

SEQ ID NO: 26514 - RNA, 20 nt, Artificial Sequence
  HTT spacer sequence GTCN PAM
cuuccagguggagggaggaa

SEQ ID NO: 26515 - RNA, 20 nt, Artificial Sequence
  HTT spacer sequence GTCN PAM
ccuguuccgcugggauguua

SEQ ID NO: 26516 - RNA, 20 nt, Artificial Sequence
  HTT spacer sequence GTCN PAM
ccaaguucauccucauccuc

SEQ ID NO: 26517 - RNA, 20 nt, Artificial Sequence
  HTT spacer sequence GTCN PAM
gcuuccugacgccacauccu

SEQ ID NO: 26518 - RNA, 20 nt, Artificial Sequence
  HTT spacer sequence GTCN PAM
ggaagcagacauaagagggg

SEQ ID NO: 26519 - RNA, 20 nt, Artificial Sequence
  HTT spacer sequence GTCN PAM
cagguuccugaguagcuggg

SEQ ID NO: 26520 - RNA, 20 nt, Artificial Sequence
  HTT spacer sequence GTCN PAM
ggucaaacagagugagaccc

SEQ ID NO: 26521 - RNA, 20 nt, Artificial Sequence
  HTT spacer sequence GTCN PAM
aacagagugagacccugucu

SEQ ID NO: 26522 - RNA, 20 nt, Artificial Sequence
  HTT spacer sequence GTCN PAM
cacucuguuugaccagacug

SEQ ID NO: 26523 - RNA, 20 nt, Artificial Sequence
  HTT spacer sequence GTCN PAM
gaaaaaaaaaaaaaaaucca

SEQ ID NO: 26524 - RNA, 20 nt, Artificial Sequence
  HTT spacer sequence GTCN PAM
uaccuuuccuuuccugccug

SEQ ID NO: 26525 - RNA, 20 nt, Artificial Sequence
  HTT spacer sequence GTCN PAM
cucccucuguguacacucca

SEQ ID NO: 26526 - RNA, 20 nt, Artificial Sequence
  HTT spacer sequence GTCN PAM
cucucauccuaggcccucca

SEQ ID NO: 26527 - RNA, 20 nt, Artificial Sequence
  HTT spacer sequence GTCN PAM
cucaguagcuuguggggucu

SEQ ID NO: 26528 - RNA, 20 nt, Artificial Sequence
  HTT spacer sequence GTCN PAM
ucucugucuagccacuuaau

SEQ ID NO: 26529 - RNA, 20 nt, Artificial Sequence
  HTT spacer sequence GTCN PAM
agccacuuaauugauugugu

SEQ ID NO: 26530 - RNA, 20 nt, Artificial Sequence
  HTT spacer sequence GTCN PAM
auggucucucguuacuguuu

SEQ ID NO: 26531 - RNA, 20 nt, Artificial Sequence
  HTT spacer sequence GTCN PAM
cucguuacuguuuucucugu

SEQ ID NO: 26532 - RNA, 20 nt, Artificial Sequence
  HTT spacer sequence GTCN PAM
auccccuuugugaccuuggc

SEQ ID NO: 26533 - RNA, 20 nt, Artificial Sequence
  HTT spacer sequence GTCN PAM
caaaggggauggaccuacca

SEQ ID NO: 26534 - RNA, 20 nt, Artificial Sequence
  HTT spacer sequence GTCN PAM
augagagcaacagccaaggu

SEQ ID NO: 26535 - RNA, 20 nt, Artificial Sequence
  HTT spacer sequence GTCN PAM
uuguaguccuggcauccagc

SEQ ID NO: 26536 - RNA, 20 nt, Artificial Sequence
  HTT spacer sequence GTCN PAM
uggcauccagcuucucgaca

SEQ ID NO: 26537 - RNA, 20 nt, Artificial Sequence
  HTT spacer sequence GTCN PAM
agaagcuggaugccaggacu

SEQ ID NO: 26538 - RNA, 20 nt, Artificial Sequence
  HTT spacer sequence GTCN PAM
cgugucgagaagcuggaugc

SEQ ID NO: 26539 - RNA, 20 nt, Artificial Sequence
  HTT spacer sequence GTCN PAM
ugccaguaccucagacuugc

SEQ ID NO: 26540 - RNA, 20 nt, Artificial Sequence
  HTT spacer sequence GTCN PAM
gagguacuggcaggacaagu

SEQ ID NO: 26541 - RNA, 20 nt, Artificial Sequence
  HTT spacer sequence GTCN PAM
cucuccagggccucuucuug

SEQ ID NO: 26542 - RNA, 20 nt, Artificial Sequence
  HTT spacer sequence GTCN PAM
gucucaucuuccaccugaac

SEQ ID NO: 26543 - RNA, 20 nt, Artificial Sequence
  HTT spacer sequence GTCN PAM
caucuuccaccugaacuucc

SEQ ID NO: 26544 - RNA, 20 nt, Artificial Sequence
  HTT spacer sequence GTCN PAM
cccagguaguagacaguaga

SEQ ID NO: 26545 - RNA, 20 nt, Artificial Sequence
  HTT spacer sequence GTCN PAM
acuaccugggugaccuugga

SEQ ID NO: 26546 - RNA, 20 nt, Artificial Sequence
  HTT spacer sequence GTCN PAM
gauucagagccuguguugac

SEQ ID NO: 26547 - RNA, 20 nt, Artificial Sequence
  HTT spacer sequence GTCN PAM
acacaggcucugaaucagac

SEQ ID NO: 26548 - RNA, 20 nt, Artificial Sequence
  HTT spacer sequence GTCN PAM
gucccugcacgugcucugug

SEQ ID NO: 26549 - RNA, 20 nt, Artificial Sequence
  HTT spacer sequence GTCN PAM
cugcacgugcucuguggccu

SEQ ID NO: 26550 - RNA, 20 nt, Artificial Sequence
  HTT spacer sequence GTCN PAM
ccuccagcccauucugcacu

SEQ ID NO: 26551 - RNA, 20 nt, Artificial Sequence
  HTT spacer sequence GTCN PAM
gcauuguccccuccagccca

SEQ ID NO: 26552 - RNA, 20 nt, Artificial Sequence
  HTT spacer sequence GTCN PAM
cuggcuccuccagguuuccu

SEQ ID NO: 26553 - RNA, 20 nt, Artificial Sequence
  HTT spacer sequence GTCN PAM
ugaccuggucugcauucucu

SEQ ID NO: 26554 - RNA, 20 nt, Artificial Sequence
  HTT spacer sequence GTCN PAM
cgacgaggaguucuaaugcc

SEQ ID NO: 26555 - RNA, 20 nt, Artificial Sequence
  HTT spacer sequence GTCN PAM
gcauucucugagugugcugc

SEQ ID NO: 26556 - RNA, 20 nt, Artificial Sequence
  HTT spacer sequence GTCN PAM
cagguuauaguuuaaggcau

SEQ ID NO: 26557 - RNA, 20 nt, Artificial Sequence
  HTT spacer sequence GTCN PAM
uaaaacagguaaaaacagag

SEQ ID NO: 26558 - RNA, 20 nt, Artificial Sequence
  HTT spacer sequence GTCN PAM
cgcuccauugcccaggcuag

SEQ ID NO: 26559 - RNA, 20 nt, Artificial Sequence
  HTT spacer sequence GTCN PAM
ccacuaaaaauacaaaaauu

SEQ ID NO: 26560 - RNA, 20 nt, Artificial Sequence
  HTT spacer sequence GTCN PAM
ggcuggucucgaacuccuga

SEQ ID NO: 26561 - RNA, 20 nt, Artificial Sequence
  HTT spacer sequence GTCN PAM
cgaacuccugaccucaagug

SEQ ID NO: 26562 - RNA, 20 nt, Artificial Sequence
  HTT spacer sequence GTCN PAM
ggaguucgagaccagccuga

SEQ ID NO: 26563 - RNA, 20 nt, Artificial Sequence
  HTT spacer sequence GTCN PAM
ugcugccucucccugcuggg

SEQ ID NO: 26564 - RNA, 20 nt, Artificial Sequence
  HTT spacer sequence GTCN PAM
cugugccuuugaccuuguuu

SEQ ID NO: 26565 - RNA, 20 nt, Artificial Sequence
  HTT spacer sequence GTCN PAM
aaggcacagagacaugcaca

SEQ ID NO: 26566 - RNA, 20 nt, Artificial Sequence
  HTT spacer sequence GTCN PAM
ugauuccuggagcccugaga

SEQ ID NO: 26567 - RNA, 20 nt, Artificial Sequence
  HTT spacer sequence GTCN PAM
gccuccccacacacaaugcu

SEQ ID NO: 26568 - RNA, 20 nt, Artificial Sequence
  HTT spacer sequence GTCN PAM
ggugucaggagccugcagag

SEQ ID NO: 26569 - RNA, 20 nt, Artificial Sequence
  HTT spacer sequence GTCN PAM
ggagccugcagagggcacac

SEQ ID NO: 26570 - RNA, 20 nt, Artificial Sequence
  HTT spacer sequence GTCN PAM
aggcucugugugcccucugc

SEQ ID NO: 26571 - RNA, 20 nt, Artificial Sequence
  HTT spacer sequence GTCN PAM
ugcuuucucaccuggccucc

SEQ ID NO: 26572 - RNA, 20 nt, Artificial Sequence
  HTT spacer sequence GTCN PAM
cucaguccuuagcaagccca

SEQ ID NO: 26573 - RNA, 20 nt, Artificial Sequence
  HTT spacer sequence GTCN PAM
uuagcaagcccaggagcugu

SEQ ID NO: 26574 - RNA, 20 nt, Artificial Sequence
  HTT spacer sequence GTCN PAM
ugugggggccccgcuguggc

SEQ ID NO: 26575 - RNA, 20 nt, Artificial Sequence
  HTT spacer sequence GTCN PAM
gggaacacucagcgccucga

SEQ ID NO: 26576 - RNA, 20 nt, Artificial Sequence
  HTT spacer sequence GTCN PAM
gaacacagcuccuggagaag

SEQ ID NO: 26577 - RNA, 20 nt, Artificial Sequence
  HTT spacer sequence GTCN PAM
gcaaugccaagcccuccagg

SEQ ID NO: 26578 - RNA, 20 nt, Artificial Sequence
  HTT spacer sequence GTCN PAM
acagugagagaggaggaaug

SEQ ID NO: 26579 - RNA, 20 nt, Artificial Sequence
  HTT spacer sequence GTCN PAM
accuccacauuggucggcaa

SEQ ID NO: 26580 - RNA, 20 nt, Artificial Sequence
  HTT spacer sequence GTCN PAM
agaaagcuagcauuccuccu

SEQ ID NO: 26581 - RNA, 20 nt, Artificial Sequence
  HTT spacer sequence GTCN PAM
auuaaauaagugggauauug

SEQ ID NO: 26582 - RNA, 20 nt, Artificial Sequence
  HTT spacer sequence GTCN PAM
ugaacuccugagcucgugau

SEQ ID NO: 26583 - RNA, 20 nt, Artificial Sequence
  HTT spacer sequence GTCN PAM
cccauacuuacguauucaga

SEQ ID NO: 26584 - RNA, 20 nt, Artificial Sequence
  HTT spacer sequence GTCN PAM
ucucccauacuuacguauuc

SEQ ID NO: 26585 - RNA, 20 nt, Artificial Sequence
  HTT spacer sequence GTCN PAM
agugccacauggcuacgcga

SEQ ID NO: 26586 - RNA, 20 nt, Artificial Sequence
  HTT spacer sequence GTCN PAM
uugcuuucaucucgguccag

SEQ ID NO: 26587 - RNA, 20 nt, Artificial Sequence
  HTT spacer sequence GTCN PAM
aggguguagaaacugccgcc

SEQ ID NO: 26588 - RNA, 20 nt, Artificial Sequence
  HTT spacer sequence GTCN PAM
gauacugcugcuugucaacc

SEQ ID NO: 26589 - RNA, 20 nt, Artificial Sequence
  HTT spacer sequence GTCN PAM
accacaccgacuaccgcugg

SEQ ID NO: 26590 - RNA, 20 nt, Artificial Sequence
  HTT spacer sequence GTCN PAM
gugugguugacaagcagcag

SEQ ID NO: 26591 - RNA, 20 nt, Artificial Sequence
  HTT spacer sequence GTCN PAM
gcugcacuucugcccaccag

SEQ ID NO: 26592 - RNA, 20 nt, Artificial Sequence
  HTT spacer sequence GTCN PAM
ugagacucccaguaaccuga

SEQ ID NO: 26593 - RNA, 20 nt, Artificial Sequence
  HTT spacer sequence GTCN PAM
caggacagggugcugggcug

SEQ ID NO: 26594 - RNA, 20 nt, Artificial Sequence
  HTT spacer sequence GTCN PAM
augaaaggaauauuaauaug

SEQ ID NO: 26595 - RNA, 20 nt, Artificial Sequence
  HTT spacer sequence GTCN PAM
caauaauaugcuguccauga

SEQ ID NO: 26596 - RNA, 20 nt, Artificial Sequence
  HTT spacer sequence GTCN PAM
agcuaaaggcauucaaaaua

SEQ ID NO: 26597 - RNA, 20 nt, Artificial Sequence
  HTT spacer sequence GTCN PAM
aagaaccugccaaagaaaau

SEQ ID NO: 26598 - RNA, 20 nt, Artificial Sequence
  HTT spacer sequence GTCN PAM
ugcucuguggcuccuacuaa

SEQ ID NO: 26599 - RNA, 20 nt, Artificial Sequence
  HTT spacer sequence GTCN PAM
uuaaauugguuccauagcca

SEQ ID NO: 26600 - RNA, 20 nt, Artificial Sequence
  HTT spacer sequence GTCN PAM
ggcuauggaaccaauuuaag

SEQ ID NO: 26601 - RNA, 20 nt, Artificial Sequence
  HTT spacer sequence GTCN PAM
uaaccucauuauaaaguaaa

SEQ ID NO: 26602 - RNA, 20 nt, Artificial Sequence
  HTT spacer sequence GTCN PAM
cagcuuuuauuuccauacau

SEQ ID NO: 26603 - RNA, 20 nt, Artificial Sequence
  HTT spacer sequence GTCN PAM
ccagaacuucuuuuccccag

SEQ ID NO: 26604 - RNA, 20 nt, Artificial Sequence
  HTT spacer sequence GTCN PAM
aguauccauacugagcagag

SEQ ID NO: 26605 - RNA, 20 nt, Artificial Sequence
  HTT spacer sequence GTCN PAM
acuguugggaggcauucuua

SEQ ID NO: 26606 - RNA, 20 nt, Artificial Sequence
  HTT spacer sequence GTCN PAM
ggucauucuguuggaggaga

SEQ ID NO: 26607 - RNA, 20 nt, Artificial Sequence
  HTT spacer sequence GTCN PAM
uucuguuggaggagacagac

SEQ ID NO: 26608 - RNA, 20 nt, Artificial Sequence
  HTT spacer sequence GTCN PAM
ccuccaacagaaugaccaga

SEQ ID NO: 26609 - RNA, 20 nt, Artificial Sequence
  HTT spacer sequence GTCN PAM
gucuccuccaacagaaugac

SEQ ID NO: 26610 - RNA, 20 nt, Artificial Sequence
  HTT spacer sequence GTCN PAM
cuggucugucuccuccaaca

SEQ ID NO: 26611 - RNA, 20 nt, Artificial Sequence
  HTT spacer sequence GTCN PAM
ucacuggucugucuccucca

SEQ ID NO: 26612 - RNA, 20 nt, Artificial Sequence
  HTT spacer sequence GTCN PAM
uaggccuguuacgaugacug

SEQ ID NO: 26613 - RNA, 20 nt, Artificial Sequence
  HTT spacer sequence GTCN PAM
ucguaacaggccuaagacau

SEQ ID NO: 26614 - RNA, 20 nt, Artificial Sequence
  HTT spacer sequence GTCN PAM
ccugcccccacagugcucag

SEQ ID NO: 26615 - RNA, 20 nt, Artificial Sequence
  HTT spacer sequence GTCN PAM
gugucuccuaguucugugcu

SEQ ID NO: 26616 - RNA, 20 nt, Artificial Sequence
  HTT spacer sequence GTCN PAM
ccuaguucugugcugcuuua

SEQ ID NO: 26617 - RNA, 20 nt, Artificial Sequence
  HTT spacer sequence GTCN PAM
gaaaaggagugaucugcuga

SEQ ID NO: 26618 - RNA, 20 nt, Artificial Sequence
  HTT spacer sequence GTCN PAM
ccugaauuggaguaacagaa

SEQ ID NO: 26619 - RNA, 20 nt, Artificial Sequence
  HTT spacer sequence GTCN PAM
ucauucagcccucugagggc

SEQ ID NO: 26620 - RNA, 20 nt, Artificial Sequence
  HTT spacer sequence GTCN PAM
cagaauuuaccuacauuuac

SEQ ID NO: 26621 - RNA, 20 nt, Artificial Sequence
  HTT spacer sequence GTCN PAM
cgaaacagucacagaauuua

SEQ ID NO: 26622 - RNA, 20 nt, Artificial Sequence
  HTT spacer sequence GTCN PAM
uggccucaggugaucugccc

SEQ ID NO: 26623 - RNA, 20 nt, Artificial Sequence
  HTT spacer sequence GTCN PAM
cgaaguccuggccucaggug

SEQ ID NO: 26624 - RNA, 20 nt, Artificial Sequence
  HTT spacer sequence GTCN PAM
cuacugaaaauaacaaaaau

SEQ ID NO: 26625 - RNA, 20 nt, Artificial Sequence
  HTT spacer sequence GTCN PAM
ccaugcucggcuaauuuuug

SEQ ID NO: 26626 - RNA, 20 nt, Artificial Sequence
  HTT spacer sequence GTCN PAM
cugcuacucagaaggcugag

SEQ ID NO: 26627 - RNA, 20 nt, Artificial Sequence
  HTT spacer sequence GTCN PAM
cccaggcuagagugcagugg

SEQ ID NO: 26628 - RNA, 20 nt, Artificial Sequence
  HTT spacer sequence GTCN PAM
cacucugucacccaggcuag

SEQ ID NO: 26629 - RNA, 20 nt, Artificial Sequence
  HTT spacer sequence GTCN PAM
aagguguccccgugguggaa

SEQ ID NO: 26630 - RNA, 20 nt, Artificial Sequence
  HTT spacer sequence GTCN PAM
ccgugguggaaggaaaaaau

SEQ ID NO: 26631 - RNA, 20 nt, Artificial Sequence
  HTT spacer sequence GTCN PAM
aagaugcccauagagagcag

SEQ ID NO: 26632 - RNA, 20 nt, Artificial Sequence
  HTT spacer sequence GTCN PAM
auggcuaaaaaaagagcagc

SEQ ID NO: 26633 - RNA, 20 nt, Artificial Sequence
  HTT spacer sequence GTCN PAM
agaguaagcagcaggaauuu

SEQ ID NO: 26634 - RNA, 20 nt, Artificial Sequence
  HTT spacer sequence GTCN PAM
ccuggagccagcucccaucu

SEQ ID NO: 26635 - RNA, 20 nt, Artificial Sequence
  HTT spacer sequence GTCN PAM
uuauguggguccugcccuag

SEQ ID NO: 26636 - RNA, 20 nt, Artificial Sequence
  HTT spacer sequence GTCN PAM
ugcccuagccuagccccucu

SEQ ID NO: 26637 - RNA, 20 nt, Artificial Sequence
  HTT spacer sequence GTCN PAM
auaagagaggggcuaggcua

SEQ ID NO: 26638 - RNA, 20 nt, Artificial Sequence
  HTT spacer sequence GTCN PAM
cuguggguuuaugauucacu

SEQ ID NO: 26639 - RNA, 20 nt, Artificial Sequence
  HTT spacer sequence GTCN PAM
uaccucuuggugaacuguua

SEQ ID NO: 26640 - RNA, 20 nt, Artificial Sequence
  HTT spacer sequence GTCN PAM
ugccuauacuuuggcgcuug

SEQ ID NO: 26641 - RNA, 20 nt, Artificial Sequence
  HTT spacer sequence GTCN PAM
cuucccagcucaucuuguuc

SEQ ID NO: 26642 - RNA, 20 nt, Artificial Sequence
  HTT spacer sequence GTCN PAM
cccuagauuugggacauuca

SEQ ID NO: 26643 - RNA, 20 nt, Artificial Sequence
  HTT spacer sequence GTCN PAM
caaaucuagggugacucaga

SEQ ID NO: 26644 - RNA, 20 nt, Artificial Sequence
  HTT spacer sequence GTCN PAM
acucaaauucagccccaauu

SEQ ID NO: 26645 - RNA, 20 nt, Artificial Sequence
  HTT spacer sequence GTCN PAM
acugucaacucaaauucagc

SEQ ID NO: 26646 - RNA, 20 nt, Artificial Sequence
  HTT spacer sequence GTCN PAM
acugcucauauuugaauugc

SEQ ID NO: 26647 - RNA, 20 nt, Artificial Sequence
  HTT spacer sequence GTCN PAM
cacugcgcuggcaggacggc

SEQ ID NO: 26648 - RNA, 20 nt, Artificial Sequence
  HTT spacer sequence GTCN PAM
ugccagcgcagugugacuua

SEQ ID NO: 26649 - RNA, 20 nt, Artificial Sequence
  HTT spacer sequence GTCN PAM
augugaaaacuaacgaacag

SEQ ID NO: 26650 - RNA, 20 nt, Artificial Sequence
  HTT spacer sequence GTCN PAM
guaacagccccccuccccca

SEQ ID NO: 26651 - RNA, 20 nt, Artificial Sequence
  HTT spacer sequence GTCN PAM
cuucaaacaguucccucuuc

SEQ ID NO: 26652 - RNA, 20 nt, Artificial Sequence
  HTT spacer sequence GTCN PAM
aaccaccaauccgugcucug

SEQ ID NO: 26653 - RNA, 20 nt, Artificial Sequence
  HTT spacer sequence GTCN PAM
cucuguucagcccauugcag

SEQ ID NO: 26654 - RNA, 20 nt, Artificial Sequence
  HTT spacer sequence GTCN PAM
uccucccacuucagccucuc

SEQ ID NO: 26655 - RNA, 20 nt, Artificial Sequence
  HTT spacer sequence GTCN PAM
ugaacucccagccucaaguc

SEQ ID NO: 26656 - RNA, 20 nt, Artificial Sequence
  HTT spacer sequence GTCN PAM
ugcuaggcagcccaggcuag

SEQ ID NO: 26657 - RNA, 20 nt, Artificial Sequence
  HTT spacer sequence GTCN PAM
cuguaguucagcugcuuggg

SEQ ID NO: 26658 - RNA, 20 nt, Artificial Sequence
  HTT spacer sequence GTCN PAM
ccuaggcuggagcacagugg

SEQ ID NO: 26659 - RNA, 20 nt, Artificial Sequence
  HTT spacer sequence GTCN PAM
ugcugugucaccuaggcugg

SEQ ID NO: 26660 - RNA, 20 nt, Artificial Sequence
  HTT spacer sequence GTCN PAM
cuggggaaaaaagaaagaaa

SEQ ID NO: 26661 - RNA, 20 nt, Artificial Sequence
  HTT spacer sequence GTCN PAM
ggccccuuucggugagcagu

SEQ ID NO: 26662 - RNA, 20 nt, Artificial Sequence
  HTT spacer sequence GTCN PAM
aaaguucugucgcguguugc

SEQ ID NO: 26663 - RNA, 20 nt, Artificial Sequence
  HTT spacer sequence GTCN PAM
cguguugcccacgcgucggu

SEQ ID NO: 26664 - RNA, 20 nt, Artificial Sequence
  HTT spacer sequence GTCN PAM
guggcucgcuccuugcaacu

SEQ ID NO: 26665 - RNA, 20 nt, Artificial Sequence
  HTT spacer sequence GTCN PAM
caucaagcuaagaauauucu

SEQ ID NO: 26666 - RNA, 20 nt, Artificial Sequence
  HTT spacer sequence GTCN PAM
ccguuaaggcccuuugccgc

SEQ ID NO: 26667 - RNA, 20 nt, Artificial Sequence
  HTT spacer sequence GTCN PAM
uucccauugcggcaaagggc

SEQ ID NO: 26668 - RNA, 20 nt, Artificial Sequence
  HTT spacer sequence GTCN PAM
cucggucagacccugaaggu

SEQ ID NO: 26669 - RNA, 20 nt, Artificial Sequence
  HTT spacer sequence GTCN PAM
gacccugaaggucagagggg

SEQ ID NO: 26670 - RNA, 20 nt, Artificial Sequence
  HTT spacer sequence GTCN PAM
gaccgagcgacguccuuccc

SEQ ID NO: 26671 - RNA, 20 nt, Artificial Sequence
  HTT spacer sequence GTCN PAM
gaggggcaguuugggagugu

SEQ ID NO: 26672 - RNA, 20 nt, Artificial Sequence
  HTT spacer sequence GTCN PAM
acauuuuaacuguauggacu

SEQ ID NO: 26673 - RNA, 20 nt, Artificial Sequence
  HTT spacer sequence GTCN PAM
auacaguuaaaauguugaca

SEQ ID NO: 26674 - RNA, 20 nt, Artificial Sequence
  HTT spacer sequence GTCN PAM
caagguuuauaauucccacg

SEQ ID NO: 26675 - RNA, 20 nt, Artificial Sequence
  HTT spacer sequence GTCN PAM
guguagagugaaauaaccug

SEQ ID NO: 26676 - RNA, 20 nt, Artificial Sequence
  HTT spacer sequence GTCN PAM
guuuuagaacuagaauuaaa

SEQ ID NO: 26677 - RNA, 20 nt, Artificial Sequence
  HTT spacer sequence GTCN PAM
augcaucuguugcuccuucu

SEQ ID NO: 26678 - RNA, 20 nt, Artificial Sequence
  HTT spacer sequence GTCN PAM
ucuagaaggagcaacagaug

SEQ ID NO: 26679 - RNA, 20 nt, Artificial Sequence
  HTT spacer sequence GTCN PAM
guccagcacaaaguuacuua

SEQ ID NO: 26680 - RNA, 20 nt, Artificial Sequence
  HTT spacer sequence GTCN PAM
agcacaaaguuacuuagucc

SEQ ID NO: 26681 - RNA, 20 nt, Artificial Sequence
  HTT spacer sequence GTCN PAM
ccagaugucuggagaagagg

SEQ ID NO: 26682 - RNA, 20 nt, Artificial Sequence
  HTT spacer sequence GTCN PAM
ggagaagaggaggauucuga

SEQ ID NO: 26683 - RNA, 20 nt, Artificial Sequence
  HTT spacer sequence GTCN PAM
gaauccuccucuucuccaga

SEQ ID NO: 26684 - RNA, 20 nt, Artificial Sequence
  HTT spacer sequence GTCN PAM
uaaguuugaaaugccuguaa

SEQ ID NO: 26685 - RNA, 20 nt, Artificial Sequence
  HTT spacer sequence GTCN PAM
ccaccucccucaaccccguu

SEQ ID NO: 26686 - RNA, 20 nt, Artificial Sequence
  HTT spacer sequence GTCN PAM
ucuacacaggauguucuccu

SEQ ID NO: 26687 - RNA, 20 nt, Artificial Sequence
  HTT spacer sequence GTCN PAM
augcaagugucaucuacaca

SEQ ID NO: 26688 - RNA, 20 nt, Artificial Sequence
  HTT spacer sequence GTCN PAM
ggguuccagaggguccaugc

SEQ ID NO: 26689 - RNA, 20 nt, Artificial Sequence
  HTT spacer sequence GTCN PAM
ugccaagcuccaucgaaacu

SEQ ID NO: 26690 - RNA, 20 nt, Artificial Sequence
  HTT spacer sequence GTCN PAM
cagcagaaguaaacauucau

SEQ ID NO: 26691 - RNA, 20 nt, Artificial Sequence
  HTT spacer sequence GTCN PAM
ccaauuauaugucacagcag

SEQ ID NO: 26692 - RNA, 20 nt, Artificial Sequence
  HTT spacer sequence GTCN PAM
cuggauucuaaguuggacug

SEQ ID NO: 26693 - RNA, 20 nt, Artificial Sequence
  HTT spacer sequence GTCN PAM
aacuuagaauccagugacug

SEQ ID NO: 26694 - RNA, 20 nt, Artificial Sequence
  HTT spacer sequence GTCN PAM
gcugcaaaaacucucacagu

SEQ ID NO: 26695 - RNA, 20 nt, Artificial Sequence
  HTT spacer sequence GTCN PAM
augcacuuacuuuguuuuuu

SEQ ID NO: 26696 - RNA, 20 nt, Artificial Sequence
  HTT spacer sequence GTCN PAM
caaacuccugggcucaagug

SEQ ID NO: 26697 - RNA, 20 nt, Artificial Sequence
  HTT spacer sequence GTCN PAM
cacaccauagcccaggcuug

SEQ ID NO: 26698 - RNA, 20 nt, Artificial Sequence
  HTT spacer sequence GTCN PAM
cgaacucccaggcucaagcc

SEQ ID NO: 26699 - RNA, 20 nt, Artificial Sequence
  HTT spacer sequence GTCN PAM
cagccaccugagagacugag

SEQ ID NO: 26700 - RNA, 20 nt, Artificial Sequence
  HTT spacer sequence GTCN PAM
cucagguggcugggaccaca

SEQ ID NO: 26701 - RNA, 20 nt, Artificial Sequence
  HTT spacer sequence GTCN PAM
cagcucacugcagccucaaa

SEQ ID NO: 26702 - RNA, 20 nt, Artificial Sequence
  HTT spacer sequence GTCN PAM
cugcacuccggccuggguga

SEQ ID NO: 26703 - RNA, 20 nt, Artificial Sequence
  HTT spacer sequence GTCN PAM
cccaggccggagugcaguga

SEQ ID NO: 26704 - RNA, 20 nt, Artificial Sequence
  HTT spacer sequence GTCN PAM
cgccuugucacccaggccgg

SEQ ID NO: 26705 - RNA, 20 nt, Artificial Sequence
  HTT spacer sequence GTCN PAM
cauuuuaugauggauuccug

SEQ ID NO: 26706 - RNA, 20 nt, Artificial Sequence
  HTT spacer sequence GTCN PAM
agauuuaauacuuuuucuau

SEQ ID NO: 26707 - RNA, 20 nt, Artificial Sequence
  HTT spacer sequence GTCN PAM
caaacaugguaucuuauaga

SEQ ID NO: 26708 - RNA, 20 nt, Artificial Sequence
  HTT spacer sequence GTCN PAM
cauagcaaaacaguguuaaa

SEQ ID NO: 26709 - RNA, 20 nt, Artificial Sequence
  HTT spacer sequence GTCN PAM
gcuuccuuuucugauucaga

SEQ ID NO: 26710 - RNA, 20 nt, Artificial Sequence
  HTT spacer sequence GTCN PAM
cuaggauaacaccucuuuca

SEQ ID NO: 26711 - RNA, 20 nt, Artificial Sequence
  HTT spacer sequence GTCN PAM
ucaccagaaaaagucucuag

SEQ ID NO: 26712 - RNA, 20 nt, Artificial Sequence
  HTT spacer sequence GTCN PAM
cuuuuugcuuuacuuucucu

SEQ ID NO: 26713 - RNA, 20 nt, Artificial Sequence
  HTT spacer sequence GTCN PAM
gcacucaaaaagcuucagaa

SEQ ID NO: 26714 - RNA, 20 nt, Artificial Sequence
  HTT spacer sequence GTCN PAM
gaugaucccaaaugaaaaau

SEQ ID NO: 26715 - RNA, 20 nt, Artificial Sequence
  HTT spacer sequence GTCN PAM
aaacuguggcagugauaggg

SEQ ID NO: 26716 - RNA, 20 nt, Artificial Sequence
  HTT spacer sequence GTCN PAM
ucccagcgcaacgcugcccc

SEQ ID NO: 26717 - RNA, 20 nt, Artificial Sequence
  HTT spacer sequence GTCN PAM
uuugacccuuggccauuugu

SEQ ID NO: 26718 - RNA, 20 nt, Artificial Sequence
  HTT spacer sequence GTCN PAM
aaggacaaaggcaggccuca

SEQ ID NO: 26719 - RNA, 20 nt, Artificial Sequence
  HTT spacer sequence GTCN PAM
cugagagcuggacugcugua

SEQ ID NO: 26720 - RNA, 20 nt, Artificial Sequence
  HTT spacer sequence GTCN PAM
agcucucagagacacuaaca

SEQ ID NO: 26721 - RNA, 20 nt, Artificial Sequence
  HTT spacer sequence GTCN PAM
ccuccaaccacgcacugcgg

SEQ ID NO: 26722 - RNA, 20 nt, Artificial Sequence
  HTT spacer sequence GTCN PAM
cuucuuguguacuugaaaau

SEQ ID NO: 26723 - RNA, 20 nt, Artificial Sequence
  HTT spacer sequence GTCN PAM
gaaccuccaugacuccgagc

SEQ ID NO: 26724 - RNA, 20 nt, Artificial Sequence
  HTT spacer sequence GTCN PAM
uggagguucugacacuaagg

SEQ ID NO: 26725 - RNA, 20 nt, Artificial Sequence
  HTT spacer sequence GTCN PAM
uguacuggaggcucguggga

SEQ ID NO: 26726 - RNA, 20 nt, Artificial Sequence
  HTT spacer sequence GTCN PAM
cguugugaaaaccuuucaac

SEQ ID NO: 26727 - RNA, 20 nt, Artificial Sequence
  HTT spacer sequence GTCN PAM
ucauccugccgacuauugcc

SEQ ID NO: 26728 - RNA, 20 nt, Artificial Sequence
  HTT spacer sequence GTCN PAM
gcaggaugaagacguacagu

SEQ ID NO: 26729 - RNA, 20 nt, Artificial Sequence
  HTT spacer sequence GTCN PAM
ucuuuuguucuuuuccuucu

SEQ ID NO: 26730 - RNA, 20 nt, Artificial Sequence
  HTT spacer sequence GTCN PAM
ggagcugugcucacgcugua

SEQ ID NO: 26731 - RNA, 20 nt, Artificial Sequence
  HTT spacer sequence GTCN PAM
acauacagcgugagcacagc

SEQ ID NO: 26732 - RNA, 20 nt, Artificial Sequence
  HTT spacer sequence GTCN PAM
acauccuugcuugucgccgg

SEQ ID NO: 26733 - RNA, 20 nt, Artificial Sequence
  HTT spacer sequence GTCN PAM
accaugcgagccagcacacg

SEQ ID NO: 26734 - RNA, 20 nt, Artificial Sequence
  HTT spacer sequence GTCN PAM
ccggguagaaaugcuucugg

SEQ ID NO: 26735 - RNA, 20 nt, Artificial Sequence
  HTT spacer sequence GTCN PAM
ugacauggucaccgauagaa

SEQ ID NO: 26736 - RNA, 20 nt, Artificial Sequence
  HTT spacer sequence GTCN PAM
agaccauacuuacggaggaa

SEQ ID NO: 26737 - RNA, 20 nt, Artificial Sequence
  HTT spacer sequence GTCN PAM
ccgauagaaacauggaaaca

SEQ ID NO: 26738 - RNA, 20 nt, Artificial Sequence
  HTT spacer sequence GTCN PAM
gaucugacuguuucuuguau

SEQ ID NO: 26739 - RNA, 20 nt, Artificial Sequence
  HTT spacer sequence GTCN PAM
gaucggacacacgaguaacg

SEQ ID NO: 26740 - RNA, 20 nt, Artificial Sequence
  HTT spacer sequence GTCN PAM
gcccuuacuaggaugaacug

SEQ ID NO: 26741 - RNA, 20 nt, Artificial Sequence
  HTT spacer sequence GTCN PAM
auuagagcagcauggcccag

SEQ ID NO: 26742 - RNA, 20 nt, Artificial Sequence
  HTT spacer sequence GTCN PAM
uccuuguguuaggacaaccc

SEQ ID NO: 26743 - RNA, 20 nt, Artificial Sequence
  HTT spacer sequence GTCN PAM
uuguguuaggacaacccagg

SEQ ID NO: 26744 - RNA, 20 nt, Artificial Sequence
  HTT spacer sequence GTCN PAM
uaacacaaggacgaccugug

SEQ ID NO: 26745 - RNA, 20 nt, Artificial Sequence
  HTT spacer sequence GTCN PAM
ugugaauuuauucccguaca

SEQ ID NO: 26746 - RNA, 20 nt, Artificial Sequence
  HTT spacer sequence GTCN PAM
uccuuuacucuuuagaaagu

SEQ ID NO: 26747 - RNA, 20 nt, Artificial Sequence
  HTT spacer sequence GTCN PAM
gugacgugaguggaggcagu

SEQ ID NO: 26748 - RNA, 20 nt, Artificial Sequence
  HTT spacer sequence GTCN PAM
cagacgugauccugccgguc

SEQ ID NO: 26749 - RNA, 20 nt, Artificial Sequence
  HTT spacer sequence GTCN PAM
ugugaugagugggaaaauag

SEQ ID NO: 26750 - RNA, 20 nt, Artificial Sequence
  HTT spacer sequence GTCN PAM
ucuaauugcuaaacaagagu

SEQ ID NO: 26751 - RNA, 20 nt, Artificial Sequence
  HTT spacer sequence GTCN PAM
cucagauuugccaacucuug

SEQ ID NO: 26752 - RNA, 20 nt, Artificial Sequence
  HTT spacer sequence GTCN PAM
ugcaugccaaggauugagua

SEQ ID NO: 26753 - RNA, 20 nt, Artificial Sequence
  HTT spacer sequence GTCN PAM
ucaaagcauuuaaucauuua

SEQ ID NO: 26754 - RNA, 20 nt, Artificial Sequence
  HTT spacer sequence GTCN PAM
uugagaagccuuugucagaa

SEQ ID NO: 26755 - RNA, 20 nt, Artificial Sequence
  HTT spacer sequence GTCN PAM
gaaaucccuacaucuccuau

SEQ ID NO: 26756 - RNA, 20 nt, Artificial Sequence
  HTT spacer sequence GTCN PAM
uggaaauacacucacauagg

SEQ ID NO: 26757 - RNA, 20 nt, Artificial Sequence
  HTT spacer sequence GTCN PAM
cucucucccucucacacaca

SEQ ID NO: 26758 - RNA, 20 nt, Artificial Sequence
  HTT spacer sequence GTCN PAM
uuagaguaccuugucuauua

SEQ ID NO: 26759 - RNA, 20 nt, Artificial Sequence
  HTT spacer sequence GTCN PAM
auuaugcuuuucagucuuua

SEQ ID NO: 26760 - RNA, 20 nt, Artificial Sequence
  HTT spacer sequence GTCN PAM
uuagaguaccuuguugaugg

SEQ ID NO: 26761 - RNA, 20 nt, Artificial Sequence
  HTT spacer sequence GTCN PAM
accuaauugugcccaauccc

SEQ ID NO: 26762 - RNA, 20 nt, Artificial Sequence
  HTT spacer sequence GTCN PAM
guagggccaagcucuuuugu

SEQ ID NO: 26763 - RNA, 20 nt, Artificial Sequence
  HTT spacer sequence GTCN PAM
cucucauagcagauggcggg

SEQ ID NO: 26764 - RNA, 20 nt, Artificial Sequence
  HTT spacer sequence GTCN PAM
aaaaguaauaauaguuuauc

SEQ ID NO: 26765 - RNA, 20 nt, Artificial Sequence
  HTT spacer sequence GTCN PAM
agggucaaaaaguaauaaua

SEQ ID NO: 26766 - RNA, 20 nt, Artificial Sequence
  HTT spacer sequence GTCN PAM
ucaguccagaugagggagau

SEQ ID NO: 26767 - RNA, 20 nt, Artificial Sequence
  HTT spacer sequence GTCN PAM
agaugagggagauuaaaaga

SEQ ID NO: 26768 - RNA, 20 nt, Artificial Sequence
  HTT spacer sequence GTCN PAM
uuucaaaauaaaaucaccuc

SEQ ID NO: 26769 - RNA, 20 nt, Artificial Sequence
  HTT spacer sequence GTCN PAM
uacugggauauuugauagug

SEQ ID NO: 26770 - RNA, 20 nt, Artificial Sequence
  HTT spacer sequence GTCN PAM
uagaugaucuguuuuacauu

SEQ ID NO: 26771 - RNA, 20 nt, Artificial Sequence
  HTT spacer sequence GTCN PAM
ugauacaaaugcaggcccua

SEQ ID NO: 26772 - RNA, 20 nt, Artificial Sequence
  HTT spacer sequence GTCN PAM
aaacucugcacacuaggauu

SEQ ID NO: 26773 - RNA, 20 nt, Artificial Sequence
  HTT spacer sequence GTCN PAM
uagucuaaacucugcacacu

SEQ ID NO: 26774 - RNA, 20 nt, Artificial Sequence
  HTT spacer sequence GTCN PAM
aaaauacaaauaaaaaugaa

SEQ ID NO: 26775 - RNA, 20 nt, Artificial Sequence
  HTT spacer sequence GTCN PAM
agcagggaauagagccuuug

SEQ ID NO: 26776 - RNA, 20 nt, Artificial Sequence
  HTT spacer sequence GTCN PAM
cuccaccaugcaagacucac

SEQ ID NO: 26777 - RNA, 20 nt, Artificial Sequence
  HTT spacer sequence GTCN PAM
ugcaugguggagagacgaaa

SEQ ID NO: 26778 - RNA, 20 nt, Artificial Sequence
  HTT spacer sequence GTCN PAM
cucuccuccagucucuuccc

SEQ ID NO: 26779 - RNA, 20 nt, Artificial Sequence
  HTT spacer sequence GTCN PAM
cuucccacccgcuggacggg

SEQ ID NO: 26780 - RNA, 20 nt, Artificial Sequence
  HTT spacer sequence GTCN PAM
agcgggugggaagagacugg

SEQ ID NO: 26781 - RNA, 20 nt, Artificial Sequence
  HTT spacer sequence GTCN PAM
cuggaaacagugaguccgga

SEQ ID NO: 26782 - RNA, 20 nt, Artificial Sequence
  HTT spacer sequence GTCN PAM
ggacaaaguaaguguccagc

SEQ ID NO: 26783 - RNA, 20 nt, Artificial Sequence
  HTT spacer sequence GTCN PAM
ggacucacuguuuccaguga

SEQ ID NO: 26784 - RNA, 20 nt, Artificial Sequence
  HTT spacer sequence GTCN PAM
agcgugucugcaugggaggc

SEQ ID NO: 26785 - RNA, 20 nt, Artificial Sequence
  HTT spacer sequence GTCN PAM
gcaugggaggcacagggcgc

SEQ ID NO: 26786 - RNA, 20 nt, Artificial Sequence
  HTT spacer sequence GTCN PAM
ccuguggcagauacagagag

SEQ ID NO: 26787 - RNA, 20 nt, Artificial Sequence
  HTT spacer sequence GTCN PAM
acggcaccuccucugcacuc

SEQ ID NO: 26788 - RNA, 20 nt, Artificial Sequence
  HTT spacer sequence GTCN PAM
cuaaccacagcuucacugag

SEQ ID NO: 26789 - RNA, 20 nt, Artificial Sequence
  HTT spacer sequence GTCN PAM
gagggagccaagcagugcug

SEQ ID NO: 26790 - RNA, 20 nt, Artificial Sequence
  HTT spacer sequence GTCN PAM
cacaucagcacugcuuggcu

SEQ ID NO: 26791 - RNA, 20 nt, Artificial Sequence
  HTT spacer sequence GTCN PAM
gccguggccugcaggccccu

SEQ ID NO: 26792 - RNA, 20 nt, Artificial Sequence
  HTT spacer sequence GTCN PAM
ggggccugcaggccacggcc

SEQ ID NO: 26793 - RNA, 20 nt, Artificial Sequence
  HTT spacer sequence GTCN PAM
augccguuagccucccucca

SEQ ID NO: 26794 - RNA, 20 nt, Artificial Sequence
  HTT spacer sequence GTCN PAM
gcaccuccacugcucauacc

SEQ ID NO: 26795 - RNA, 20 nt, Artificial Sequence
  HTT spacer sequence GTCN PAM
cuaaccaugagguaugagca

SEQ ID NO: 26796 - RNA, 20 nt, Artificial Sequence
  HTT spacer sequence GTCN PAM
aggaaaguagaguaccaagg

SEQ ID NO: 26797 - RNA, 20 nt, Artificial Sequence
  HTT spacer sequence GTCN PAM
ugccuucuuaggcucuauuc

SEQ ID NO: 26798 - RNA, 20 nt, Artificial Sequence
  HTT spacer sequence GTCN PAM
gcuuuacucaucucucccca

SEQ ID NO: 26799 - RNA, 20 nt, Artificial Sequence
  HTT spacer sequence GTCN PAM
aaaggggaaaaccuguggug

SEQ ID NO: 26800 - RNA, 20 nt, Artificial Sequence
  HTT spacer sequence GTCN PAM
ccuugaacgccgcccaucau

SEQ ID NO: 26801 - RNA, 20 nt, Artificial Sequence
  HTT spacer sequence GTCN PAM
ugggaagaaaaaaauggaua

SEQ ID NO: 26802 - RNA, 20 nt, Artificial Sequence
  HTT spacer sequence GTCN PAM
aaucccaguguuggaccagg

SEQ ID NO: 26803 - RNA, 20 nt, Artificial Sequence
  HTT spacer sequence GTCN PAM
aacacugggauuugacaaga

SEQ ID NO: 26804 - RNA, 20 nt, Artificial Sequence
  HTT spacer sequence GTCN PAM
gauucugcacugcuggaagg

SEQ ID NO: 26805 - RNA, 20 nt, Artificial Sequence
  HTT spacer sequence GTCN PAM
caagaaaagcugaggauucc

SEQ ID NO: 26806 - RNA, 20 nt, Artificial Sequence
  HTT spacer sequence GTCN PAM
caucaucaugugacccacuu

SEQ ID NO: 26807 - RNA, 20 nt, Artificial Sequence
  HTT spacer sequence GTCN PAM
caugaugaugagacaaaucc

SEQ ID NO: 26808 - RNA, 20 nt, Artificial Sequence
  HTT spacer sequence GTCN PAM
acaagugggucacaugauga

SEQ ID NO: 26809 - RNA, 20 nt, Artificial Sequence
  HTT spacer sequence GTCN PAM
ccaacauguguugucaacaa

SEQ ID NO: 26810 - RNA, 20 nt, Artificial Sequence
  HTT spacer sequence GTCN PAM
gggcagggacgggaugucgg

SEQ ID NO: 26811 - RNA, 20 nt, Artificial Sequence
  HTT spacer sequence GTCN PAM
cugcccagacuggagucccc

SEQ ID NO: 26812 - RNA, 20 nt, Artificial Sequence
  HTT spacer sequence GTCN PAM
gagagacuccacucugaaug

SEQ ID NO: 26813 - RNA, 20 nt, Artificial Sequence
  HTT spacer sequence GTCN PAM
cuccgacaucccgucccugc

SEQ ID NO: 26814 - RNA, 20 nt, Artificial Sequence
  HTT spacer sequence GTCN PAM
uccccacuucccggccccau

SEQ ID NO: 26815 - RNA, 20 nt, Artificial Sequence
  HTT spacer sequence GTCN PAM
ggacauggggguuaugcuga

SEQ ID NO: 26816 - RNA, 20 nt, Artificial Sequence
  HTT spacer sequence GTCN PAM
cgaccccaucugaaauggag

SEQ ID NO: 26817 - RNA, 20 nt, Artificial Sequence
  HTT spacer sequence GTCN PAM
cgaucagcauaacccccaug

SEQ ID NO: 26818 - RNA, 20 nt, Artificial Sequence
  HTT spacer sequence GTCN PAM
uggccauggagcuuagauga

SEQ ID NO: 26819 - RNA, 20 nt, Artificial Sequence
  HTT spacer sequence GTCN PAM
agguugcguauuugccguag

SEQ ID NO: 26820 - RNA, 20 nt, Artificial Sequence
  HTT spacer sequence GTCN PAM
acggcaaauacgcaaccuug

SEQ ID NO: 26821 - RNA, 20 nt, Artificial Sequence
  HTT spacer sequence GTCN PAM
uaaugcgugacgucaauaac

SEQ ID NO: 26822 - RNA, 20 nt, Artificial Sequence
  HTT spacer sequence GTCN PAM
cgcauuacgacacuguguug

SEQ ID NO: 26823 - RNA, 20 nt, Artificial Sequence
  HTT spacer sequence GTCN PAM
auaacuuguuucuagugucu

SEQ ID NO: 26824 - RNA, 20 nt, Artificial Sequence
  HTT spacer sequence GTCN PAM
uggaaguugaucuuuagucg

SEQ ID NO: 26825 - RNA, 20 nt, Artificial Sequence
  HTT spacer sequence GTCN PAM
uaaaagagacccuuggaugc

SEQ ID NO: 26826 - RNA, 20 nt, Artificial Sequence
  HTT spacer sequence GTCN PAM
cuuuuacgacuaaagaucaa

SEQ ID NO: 26827 - RNA, 20 nt, Artificial Sequence
  HTT spacer sequence GTCN PAM
gagggcacccugcgcagagc

SEQ ID NO: 26828 - RNA, 20 nt, Artificial Sequence
  HTT spacer sequence GTCN PAM
cugucccucacccgugggca

SEQ ID NO: 26829 - RNA, 20 nt, Artificial Sequence
  HTT spacer sequence GTCN PAM
cucacccgugggcagguccu

SEQ ID NO: 26830 - RNA, 20 nt, Artificial Sequence
  HTT spacer sequence GTCN PAM
ugugagcagugggggggcca

SEQ ID NO: 26831 - RNA, 20 nt, Artificial Sequence
  HTT spacer sequence GTCN PAM
gagaagaagcccugcuuggg

SEQ ID NO: 26832 - RNA, 20 nt, Artificial Sequence
  HTT spacer sequence GTCN PAM
uaguaggucugagaagaagc

SEQ ID NO: 26833 - RNA, 20 nt, Artificial Sequence
  HTT spacer sequence GTCN PAM
ucccaggugcccacuucccu

SEQ ID NO: 26834 - RNA, 20 nt, Artificial Sequence
  HTT spacer sequence GTCN PAM
cucccggccucuacaggcau

SEQ ID NO: 26835 - RNA, 20 nt, Artificial Sequence
  HTT spacer sequence GTCN PAM
cuuuucaugaacaccugccg

SEQ ID NO: 26836 - RNA, 20 nt, Artificial Sequence
  HTT spacer sequence GTCN PAM
caaaaaaaaaaaaaaagaua

SEQ ID NO: 26837 - RNA, 20 nt, Artificial Sequence
  HTT spacer sequence GTCN PAM
cgcuguugucccccaggcug

SEQ ID NO: 26838 - RNA, 20 nt, Artificial Sequence
  HTT spacer sequence GTCN PAM
cccaggcuggagugcaaugg

SEQ ID NO: 26839 - RNA, 20 nt, Artificial Sequence
  HTT spacer sequence GTCN PAM
cuacuaaaaauacaaaaauu

SEQ ID NO: 26840 - RNA, 20 nt, Artificial Sequence
  HTT spacer sequence GTCN PAM
caaacuccugaccucaggug

SEQ ID NO: 26841 - RNA, 20 nt, Artificial Sequence
  HTT spacer sequence GTCN PAM
ggaguuugagaccagccugg

SEQ ID NO: 26842 - RNA, 20 nt, Artificial Sequence
  HTT spacer sequence GTCN PAM
gaacuuuuacagcuguucaa

SEQ ID NO: 26843 - RNA, 20 nt, Artificial Sequence
  HTT spacer sequence GTCN PAM
auuuggauuauguuuuagca

SEQ ID NO: 26844 - RNA, 20 nt, Artificial Sequence
  HTT spacer sequence GTCN PAM
uggaugacacuuuagcuuug

SEQ ID NO: 26845 - RNA, 20 nt, Artificial Sequence
  HTT spacer sequence GTCN PAM
uccaagaccucagugauaca

SEQ ID NO: 26846 - RNA, 20 nt, Artificial Sequence
  HTT spacer sequence GTCN PAM
uaccaaaauuuuuauuucaa

SEQ ID NO: 26847 - RNA, 20 nt, Artificial Sequence
  HTT spacer sequence GTCN PAM
ccucacgggcugcuucaaaa

SEQ ID NO: 26848 - RNA, 20 nt, Artificial Sequence
  HTT spacer sequence GTCN PAM
aucaugucuuccagcccgag

SEQ ID NO: 26849 - RNA, 20 nt, Artificial Sequence
  HTT spacer sequence GTCN PAM
uccagcccgagcugccugca

SEQ ID NO: 26850 - RNA, 20 nt, Artificial Sequence
  HTT spacer sequence GTCN PAM
ucggcucagaauuucuuccu

SEQ ID NO: 26851 - RNA, 20 nt, Artificial Sequence
  HTT spacer sequence GTCN PAM
augaauggcaaaguggcaaa

SEQ ID NO: 26852 - RNA, 20 nt, Artificial Sequence
  HTT spacer sequence GTCN PAM
uggacauagggcucuaagcc

SEQ ID NO: 26853 - RNA, 20 nt, Artificial Sequence
  HTT spacer sequence GTCN PAM
augaccaugucaaugaaugg

SEQ ID NO: 26854 - RNA, 20 nt, Artificial Sequence
  HTT spacer sequence GTCN PAM
ggcccagccuuccucaaggg

SEQ ID NO: 26855 - RNA, 20 nt, Artificial Sequence
  HTT spacer sequence GTCN PAM
uguggacggauguguagaug

SEQ ID NO: 26856 - RNA, 20 nt, Artificial Sequence
  HTT spacer sequence GTCN PAM
acaggacugcacgugguuug

SEQ ID NO: 26857 - RNA, 20 nt, Artificial Sequence
  HTT spacer sequence GTCN PAM
ugagcuuucaucagauucuc

SEQ ID NO: 26858 - RNA, 20 nt, Artificial Sequence
  HTT spacer sequence GTCN PAM
agcaauucucugagaaucug

SEQ ID NO: 26859 - RNA, 20 nt, Artificial Sequence
  HTT spacer sequence GTCN PAM
uucuguuucaggggaugcug

SEQ ID NO: 26860 - RNA, 20 nt, Artificial Sequence
  HTT spacer sequence GTCN PAM
cugcccacucuggcccgggc

SEQ ID NO: 26861 - RNA, 20 nt, Artificial Sequence
  HTT spacer sequence GTCN PAM
ccaaacugcccagucauuug

SEQ ID NO: 26862 - RNA, 20 nt, Artificial Sequence
  HTT spacer sequence GTCN PAM
uuugcaccuuccuccugaga

SEQ ID NO: 26863 - RNA, 20 nt, Artificial Sequence
  HTT spacer sequence GTCN PAM
uucucuuucucaggaggaag

SEQ ID NO: 26864 - RNA, 20 nt, Artificial Sequence
  HTT spacer sequence GTCN PAM
gccccaugcccccuccccac

SEQ ID NO: 26865 - RNA, 20 nt, Artificial Sequence
  HTT spacer sequence GTCN PAM
gagaucuugcuuuucaaaua

SEQ ID NO: 26866 - RNA, 20 nt, Artificial Sequence
  HTT spacer sequence GTCN PAM
agucacuuuuccaucucagc

SEQ ID NO: 26867 - RNA, 20 nt, Artificial Sequence
  HTT spacer sequence GTCN PAM
cuuuuccaucucagccuggc

SEQ ID NO: 26868 - RNA, 20 nt, Artificial Sequence
  HTT spacer sequence GTCN PAM
ugucaccgucaaguuauugu

SEQ ID NO: 26869 - RNA, 20 nt, Artificial Sequence
  HTT spacer sequence GTCN PAM
ccgucaaguuauuguagcca

SEQ ID NO: 26870 - RNA, 20 nt, Artificial Sequence
  HTT spacer sequence GTCN PAM
aguuauuguagccauccuuc

SEQ ID NO: 26871 - RNA, 20 nt, Artificial Sequence
  HTT spacer sequence GTCN PAM
gccagguccccuucucaucu

SEQ ID NO: 26872 - RNA, 20 nt, Artificial Sequence
  HTT spacer sequence GTCN PAM
ccuucucaucugcaccuacc

SEQ ID NO: 26873 - RNA, 20 nt, Artificial Sequence
  HTT spacer sequence GTCN PAM
cuaaaauuaggauccaccua

SEQ ID NO: 26874 - RNA, 20 nt, Artificial Sequence
  HTT spacer sequence GTCN PAM
uaaguuggccuggacauguc

SEQ ID NO: 26875 - RNA, 20 nt, Artificial Sequence
  HTT spacer sequence GTCN PAM
aggccaacuuaagacauaaa

SEQ ID NO: 26876 - RNA, 20 nt, Artificial Sequence
  HTT spacer sequence GTCN PAM
gccaaggaauacuuacuugg

SEQ ID NO: 26877 - RNA, 20 nt, Artificial Sequence
  HTT spacer sequence GTCN PAM
ggccuguauccuuaaagggc

SEQ ID NO: 26878 - RNA, 20 nt, Artificial Sequence
  HTT spacer sequence GTCN PAM
uugcugagggcaggcagcac

SEQ ID NO: 26879 - RNA, 20 nt, Artificial Sequence
  HTT spacer sequence GTCN PAM
gcaaaguguguccuugcuga

SEQ ID NO: 26880 - RNA, 20 nt, Artificial Sequence
  HTT spacer sequence GTCN PAM
aaagggcaucagugccauua

SEQ ID NO: 26881 - RNA, 20 nt, Artificial Sequence
  HTT spacer sequence GTCN PAM
uaugguuugugaucccuguc

SEQ ID NO: 26882 - RNA, 20 nt, Artificial Sequence
  HTT spacer sequence GTCN PAM
uucagguuucagcuuagugg

SEQ ID NO: 26883 - RNA, 20 nt, Artificial Sequence
  HTT spacer sequence GTCN PAM
gcgugugaucacagcacagg

SEQ ID NO: 26884 - RNA, 20 nt, Artificial Sequence
  HTT spacer sequence GTCN PAM
ucuuauuugacucucacaac

SEQ ID NO: 26885 - RNA, 20 nt, Artificial Sequence
  HTT spacer sequence GTCN PAM
aauaagaugacgcauauaaa

SEQ ID NO: 26886 - RNA, 20 nt, Artificial Sequence
  HTT spacer sequence GTCN PAM
aaugggaguaacagagccua

SEQ ID NO: 26887 - RNA, 20 nt, Artificial Sequence
  HTT spacer sequence GTCN PAM
cugaaauucucuaagccuug

SEQ ID NO: 26888 - RNA, 20 nt, Artificial Sequence
  HTT spacer sequence GTCN PAM
ucugagcuaggaaguagcca

SEQ ID NO: 26889 - RNA, 20 nt, Artificial Sequence
  HTT spacer sequence GTCN PAM
uagguugaauuugagagcgu

SEQ ID NO: 26890 - RNA, 20 nt, Artificial Sequence
  HTT spacer sequence GTCN PAM
ccucucugccacaaagcccc

SEQ ID NO: 26891 - RNA, 20 nt, Artificial Sequence
  HTT spacer sequence GTCN PAM
ggacugaauguaauggagcc

SEQ ID NO: 26892 - RNA, 20 nt, Artificial Sequence
  HTT spacer sequence GTCN PAM
ugacccaccuauuccccaaa

SEQ ID NO: 26893 - RNA, 20 nt, Artificial Sequence
  HTT spacer sequence GTCN PAM
gagcuguccuucuggaaggg

SEQ ID NO: 26894 - RNA, 20 nt, Artificial Sequence
  HTT spacer sequence GTCN PAM
uucuggaagggcaagggcac

SEQ ID NO: 26895 - RNA, 20 nt, Artificial Sequence
  HTT spacer sequence GTCN PAM
aggugcccuugcccuuccag

SEQ ID NO: 26896 - RNA, 20 nt, Artificial Sequence
  HTT spacer sequence GTCN PAM
aaagcacugaggggcagcgc

SEQ ID NO: 26897 - RNA, 20 nt, Artificial Sequence
  HTT spacer sequence GTCN PAM
cagaaugcccacucguguac

SEQ ID NO: 26898 - RNA, 20 nt, Artificial Sequence
  HTT spacer sequence GTCN PAM
uggcauuugauccaugagca

SEQ ID NO: 26899 - RNA, 20 nt, Artificial Sequence
  HTT spacer sequence GTCN PAM
ggaucuccaggcagggcugg

SEQ ID NO: 26900 - RNA, 20 nt, Artificial Sequence
  HTT spacer sequence GTCN PAM
agcccugccuggagauccag

SEQ ID NO: 26901 - RNA, 20 nt, Artificial Sequence
  HTT spacer sequence GTCN PAM
ccuccacagaguuugugacc

SEQ ID NO: 26902 - RNA, 20 nt, Artificial Sequence
  HTT spacer sequence GTCN PAM
caaacucuguggaggagacc

SEQ ID NO: 26903 - RNA, 20 nt, Artificial Sequence
  HTT spacer sequence GTCN PAM
ccguccaugaacgguggguu

SEQ ID NO: 26904 - RNA, 20 nt, Artificial Sequence
  HTT spacer sequence GTCN PAM
augaacgguggguuccuauc

SEQ ID NO: 26905 - RNA, 20 nt, Artificial Sequence
  HTT spacer sequence GTCN PAM
gcuucaccauguuuuuauuu

SEQ ID NO: 26906 - RNA, 20 nt, Artificial Sequence
  HTT spacer sequence GTCN PAM
acacuggaauuuaacuggaa

SEQ ID NO: 26907 - RNA, 20 nt, Artificial Sequence
  HTT spacer sequence GTCN PAM
uuuuauuuagauuuugaagu

SEQ ID NO: 26908 - RNA, 20 nt, Artificial Sequence
  HTT spacer sequence GTCN PAM
cugugaucuuuggucuuagc

SEQ ID NO: 26909 - RNA, 20 nt, Artificial Sequence
  HTT spacer sequence GTCN PAM
uagcuguuuuauguauuuag

SEQ ID NO: 26910 - RNA, 20 nt, Artificial Sequence
  HTT spacer sequence GTCN PAM
uauaugaucauaagauuaau

SEQ ID NO: 26911 - RNA, 20 nt, Artificial Sequence
  HTT spacer sequence GTCN PAM
gaguuaaaauguuuguuuuu

SEQ ID NO: 26912 - RNA, 20 nt, Artificial Sequence
  HTT spacer sequence GTCN PAM
uuagccacaauuuuuaaaaa

SEQ ID NO: 26913 - RNA, 20 nt, Artificial Sequence
  HTT spacer sequence GTCN PAM
aauuuuuuaaaaauuguggc

SEQ ID NO: 26914 - RNA, 20 nt, Artificial Sequence
  HTT spacer sequence GTCN PAM
uaguuuacauguuagagggc

SEQ ID NO: 26915 - RNA, 20 nt, Artificial Sequence
  HTT spacer sequence GTCN PAM
ggcuuuuaaguaguaauccc

SEQ ID NO: 26916 - RNA, 20 nt, Artificial Sequence
  HTT spacer sequence GTCN PAM
cauaauaaccucagggugag

SEQ ID NO: 26917 - RNA, 20 nt, Artificial Sequence
  HTT spacer sequence GTCN PAM
ccuguuggccaucucucacc

SEQ ID NO: 26918 - RNA, 20 nt, Artificial Sequence
  HTT spacer sequence GTCN PAM
agggacuuagaaaucugaau

SEQ ID NO: 26919 - RNA, 20 nt, Artificial Sequence
  HTT spacer sequence GTCN PAM
cucgacugucuccuguuggc

SEQ ID NO: 26920 - RNA, 20 nt, Artificial Sequence
  HTT spacer sequence GTCN PAM
gaagauuugaacuucagauu

SEQ ID NO: 26921 - RNA, 20 nt, Artificial Sequence
  HTT spacer sequence GTCN PAM
aguauugucuguuugucuaa

SEQ ID NO: 26922 - RNA, 20 nt, Artificial Sequence
  HTT spacer sequence GTCN PAM
guuugucuaaaauugguucu

SEQ ID NO: 26923 - RNA, 20 nt, Artificial Sequence
  HTT spacer sequence GTCN PAM
aaaauugguucuaaggaauc

SEQ ID NO: 26924 - RNA, 20 nt, Artificial Sequence
  HTT spacer sequence GTCN PAM
gucuaucccuuucaacuuuu

SEQ ID NO: 26925 - RNA, 20 nt, Artificial Sequence
  HTT spacer sequence GTCN PAM
aucccuuucaacuuuuguga

SEQ ID NO: 26926 - RNA, 20 nt, Artificial Sequence
  HTT spacer sequence GTCN PAM
agaaagaaggacaaauaccc

SEQ ID NO: 26927 - RNA, 20 nt, Artificial Sequence
  HTT spacer sequence GTCN PAM
uucuuucuggacuaagaagc

SEQ ID NO: 26928 - RNA, 20 nt, Artificial Sequence
  HTT spacer sequence GTCN PAM
caggacccauuuuuuucuua

SEQ ID NO: 26929 - RNA, 20 nt, Artificial Sequence
  HTT spacer sequence GTCN PAM
ugagacuuacucuguguguu

SEQ ID NO: 26930 - RNA, 20 nt, Artificial Sequence
  HTT spacer sequence GTCN PAM
uggaggaacaacauguaaga

SEQ ID NO: 26931 - RNA, 20 nt, Artificial Sequence
  HTT spacer sequence GTCN PAM
cugugaaugauuuuuaaguc

SEQ ID NO: 26932 - RNA, 20 nt, Artificial Sequence
  HTT spacer sequence GTCN PAM
acacucaccgcggugcacgu

SEQ ID NO: 26933 - RNA, 20 nt, Artificial Sequence
  HTT spacer sequence GTCN PAM
ugcugcuccucccuagcugu

SEQ ID NO: 26934 - RNA, 20 nt, Artificial Sequence
  HTT spacer sequence GTCN PAM
gggaggcuguaguccauugc

SEQ ID NO: 26935 - RNA, 20 nt, Artificial Sequence
  HTT spacer sequence GTCN PAM
auugcuuugccagcucuuuu

SEQ ID NO: 26936 - RNA, 20 nt, Artificial Sequence
  HTT spacer sequence GTCN PAM
cugacccuacagaccagcug

SEQ ID NO: 26937 - RNA, 20 nt, Artificial Sequence
  HTT spacer sequence GTCN PAM
gagacagccgcauguguacg

SEQ ID NO: 26938 - RNA, 20 nt, Artificial Sequence
  HTT spacer sequence GTCN PAM
guagggucagagacagccgc

SEQ ID NO: 26939 - RNA, 20 nt, Artificial Sequence
  HTT spacer sequence GTCN PAM
ucuuuguguucucagaaauu

SEQ ID NO: 26940 - RNA, 20 nt, Artificial Sequence
  HTT spacer sequence GTCN PAM
gcaagcaacaaccuuuuguu

SEQ ID NO: 26941 - RNA, 20 nt, Artificial Sequence
  HTT spacer sequence GTCN PAM
gguucagccaucuguuuugg

SEQ ID NO: 26942 - RNA, 20 nt, Artificial Sequence
  HTT spacer sequence GTCN PAM
auaacuggcuuaaaucacug

SEQ ID NO: 26943 - RNA, 20 nt, Artificial Sequence
  HTT spacer sequence GTCN PAM
aagucuauaacuggcuuaaa

SEQ ID NO: 26944 - RNA, 20 nt, Artificial Sequence
  HTT spacer sequence GTCN PAM
uuuguucuugccagggcccc

SEQ ID NO: 26945 - RNA, 20 nt, Artificial Sequence
  HTT spacer sequence GTCN PAM
gguggggaauggccccuguu

SEQ ID NO: 26946 - RNA, 20 nt, Artificial Sequence
  HTT spacer sequence GTCN PAM
cacagaggugggggugccuc

SEQ ID NO: 26947 - RNA, 20 nt, Artificial Sequence
  HTT spacer sequence GTCN PAM
acacauuuuacacagcacgc

SEQ ID NO: 26948 - RNA, 20 nt, Artificial Sequence
  HTT spacer sequence GTCN PAM
uuagucuucugcauaguacu

SEQ ID NO: 26949 - RNA, 20 nt, Artificial Sequence
  HTT spacer sequence GTCN PAM
ucugcauaguacuuuucucu

SEQ ID NO: 26950 - RNA, 20 nt, Artificial Sequence
  HTT spacer sequence GTCN PAM
uucucuaauuacaaaaccuu

SEQ ID NO: 26951 - RNA, 20 nt, Artificial Sequence
  HTT spacer sequence GTCN PAM
uuggcugugcauuaaaaugc

SEQ ID NO: 26952 - RNA, 20 nt, Artificial Sequence
  HTT spacer sequence GTCN PAM
uucaggcuucaguuugugau

SEQ ID NO: 26953 - RNA, 20 nt, Artificial Sequence
  HTT spacer sequence GTCN PAM
uccguuccaggugcuuuaca

SEQ ID NO: 26954 - RNA, 20 nt, Artificial Sequence
  HTT spacer sequence GTCN PAM
uguuaugaauacucaacaaa

SEQ ID NO: 26955 - RNA, 20 nt, Artificial Sequence
  HTT spacer sequence GTCN PAM
caacuguuuuaaagcaaugg

SEQ ID NO: 26956 - RNA, 20 nt, Artificial Sequence
  HTT spacer sequence GTCN PAM
uaucgaggugauuaaaaaaa

SEQ ID NO: 26957 - RNA, 20 nt, Artificial Sequence
  HTT spacer sequence GTCN PAM
uccaauaaauauuaauaggc

SEQ ID NO: 26958 - RNA, 20 nt, Artificial Sequence
  HTT spacer sequence GTCN PAM
ggagaucgagaccaucccag

SEQ ID NO: 26959 - RNA, 20 nt, Artificial Sequence
  HTT spacer sequence GTCN PAM
cgaucuccugaccucgugau

SEQ ID NO: 26960 - RNA, 20 nt, Artificial Sequence
  HTT spacer sequence GTCN PAM
cuacuaaaaauacaaaaaau

SEQ ID NO: 26961 - RNA, 20 nt, Artificial Sequence
  HTT spacer sequence GTCN PAM
cagcuacuugggaggcugag

SEQ ID NO: 26962 - RNA, 20 nt, Artificial Sequence
  HTT spacer sequence GTCN PAM
cccaggcuggagugcagugg

SEQ ID NO: 26963 - RNA, 20 nt, Artificial Sequence
  HTT spacer sequence GTCN PAM
ugcucugucgcccaggcugg

SEQ ID NO: 26964 - RNA, 20 nt, Artificial Sequence
  HTT spacer sequence GTCN PAM
caaaaaaaaaaaaaaauauu

SEQ ID NO: 26965 - RNA, 20 nt, Artificial Sequence
  HTT spacer sequence GTCN PAM
aaugagaaguccuucucuau

SEQ ID NO: 26966 - RNA, 20 nt, Artificial Sequence
  HTT spacer sequence GTCN PAM
uucucuauccuaggaaguug

SEQ ID NO: 26967 - RNA, 20 nt, Artificial Sequence
  HTT spacer sequence GTCN PAM
agaauaucauaccuacuaaa

SEQ ID NO: 26968 - RNA, 20 nt, Artificial Sequence
  HTT spacer sequence GTCN PAM
ugagucuagaauaucauacc

SEQ ID NO: 26969 - RNA, 20 nt, Artificial Sequence
  HTT spacer sequence GTCN PAM
acagcgucugccuugggagu

SEQ ID NO: 26970 - RNA, 20 nt, Artificial Sequence
  HTT spacer sequence GTCN PAM
gccuugggaguuuccaugcc

SEQ ID NO: 26971 - RNA, 20 nt, Artificial Sequence
  HTT spacer sequence GTCN PAM
gagugcuugaggggcuuggg

SEQ ID NO: 26972 - RNA, 20 nt, Artificial Sequence
  HTT spacer sequence GTCN PAM
uccuugcuucacuggcuuuc

SEQ ID NO: 26973 - RNA, 20 nt, Artificial Sequence
  HTT spacer sequence GTCN PAM
cucagcuaguaucaaagggc

SEQ ID NO: 26974 - RNA, 20 nt, Artificial Sequence
  HTT spacer sequence GTCN PAM
gucccucagcuaguaucaaa

SEQ ID NO: 26975 - RNA, 20 nt, Artificial Sequence
  HTT spacer sequence GTCN PAM
ugggagaccagagaaagacg

SEQ ID NO: 26976 - RNA, 20 nt, Artificial Sequence
  HTT spacer sequence GTCN PAM
cccaggaccugugucugucc

SEQ ID NO: 26977 - RNA, 20 nt, Artificial Sequence
  HTT spacer sequence GTCN PAM
uucucuggucucccaggacc

SEQ ID NO: 26978 - RNA, 20 nt, Artificial Sequence
  HTT spacer sequence GTCN PAM
uaaaggaagucugaggcuga

SEQ ID NO: 26979 - RNA, 20 nt, Artificial Sequence
  HTT spacer sequence GTCN PAM
gaggcugaggagccacagga

SEQ ID NO: 26980 - RNA, 20 nt, Artificial Sequence
  HTT spacer sequence GTCN PAM
caggcugcugcuggccuuau

SEQ ID NO: 26981 - RNA, 20 nt, Artificial Sequence
  HTT spacer sequence GTCN PAM
ugaaccugagcucuggccuu

SEQ ID NO: 26982 - RNA, 20 nt, Artificial Sequence
  HTT spacer sequence GTCN PAM
aaguggauuccacaguuaca

SEQ ID NO: 26983 - RNA, 20 nt, Artificial Sequence
  HTT spacer sequence GTCN PAM
ugcuuucuacacugggcaua

SEQ ID NO: 26984 - RNA, 20 nt, Artificial Sequence
  HTT spacer sequence GTCN PAM
ucucuuaaccguugcuuguu

SEQ ID NO: 26985 - RNA, 20 nt, Artificial Sequence
  HTT spacer sequence GTCN PAM
cugcagucgguguuggccuu

SEQ ID NO: 26986 - RNA, 20 nt, Artificial Sequence
  HTT spacer sequence GTCN PAM
guguuggccuugggucauaa

SEQ ID NO: 26987 - RNA, 20 nt, Artificial Sequence
  HTT spacer sequence GTCN PAM
uaaaaggaauagcggcgugc

SEQ ID NO: 26988 - RNA, 20 nt, Artificial Sequence
  HTT spacer sequence GTCN PAM
acagcuacacacgugugccc

SEQ ID NO: 26989 - RNA, 20 nt, Artificial Sequence
  HTT spacer sequence GTCN PAM
gcucguuccuugcagaagac

SEQ ID NO: 26990 - RNA, 20 nt, Artificial Sequence
  HTT spacer sequence GTCN PAM
ucugcaaggaacgagcagac

SEQ ID NO: 26991 - RNA, 20 nt, Artificial Sequence
  HTT spacer sequence GTCN PAM
cgcccucucacgugugccca

SEQ ID NO: 26992 - RNA, 20 nt, Artificial Sequence
  HTT spacer sequence GTCN PAM
cuaguagaaauacuggguuu

SEQ ID NO: 26993 - RNA, 20 nt, Artificial Sequence
  HTT spacer sequence GTCN PAM
aacacuaaucucuuagggau

SEQ ID NO: 26994 - RNA, 20 nt, Artificial Sequence
  HTT spacer sequence GTCN PAM
aguugcucuagaaucagguc

SEQ ID NO: 26995 - RNA, 20 nt, Artificial Sequence
  HTT spacer sequence GTCN PAM
gcuauuaagcaaaguggucu

SEQ ID NO: 26996 - RNA, 20 nt, Artificial Sequence
  HTT spacer sequence GTCN PAM
ucagaauugguuuaaaguag

SEQ ID NO: 26997 - RNA, 20 nt, Artificial Sequence
  HTT spacer sequence GTCN PAM
ggauuucgagaccagccugg

SEQ ID NO: 26998 - RNA, 20 nt, Artificial Sequence
  HTT spacer sequence GTCN PAM
cgaaauccugaccucaagug

SEQ ID NO: 26999 - RNA, 20 nt, Artificial Sequence
  HTT spacer sequence GTCN PAM
ccugaguagcugggauuaca

SEQ ID NO: 27000 - RNA, 20 nt, Artificial Sequence
  HTT spacer sequence GTCN PAM
cagucuccugaguagcuggg

SEQ ID NO: 27001 - RNA, 20 nt, Artificial Sequence
  HTT spacer sequence GTCN PAM
ugcucuguugcccaggcuag

SEQ ID NO: 27002 - RNA, 20 nt, Artificial Sequence
  HTT spacer sequence GTCN PAM
caaaaaaaaaaaagguaggu

SEQ ID NO: 27003 - RNA, 20 nt, Artificial Sequence
  HTT spacer sequence GTCN PAM
cccuccaucaacccucacuc

SEQ ID NO: 27004 - RNA, 20 nt, Artificial Sequence
  HTT spacer sequence GTCN PAM
gucccccuccaucaacccuc

SEQ ID NO: 27005 - RNA, 20 nt, Artificial Sequence
  HTT spacer sequence GTCN PAM
gccuuucuuuccugccugag

SEQ ID NO: 27006 - RNA, 20 nt, Artificial Sequence
  HTT spacer sequence GTCN PAM
gggagaauggagccaggucc

SEQ ID NO: 27007 - RNA, 20 nt, Artificial Sequence
  HTT spacer sequence GTCN PAM
cagggaagaggcuuguggcu

SEQ ID NO: 27008 - RNA, 20 nt, Artificial Sequence
  HTT spacer sequence GTCN PAM
agggaggcuugcuccaagga

SEQ ID NO: 27009 - RNA, 20 nt, Artificial Sequence
  HTT spacer sequence GTCN PAM
uuggagcaagccucccuaga

SEQ ID NO: 27010 - RNA, 20 nt, Artificial Sequence
  HTT spacer sequence GTCN PAM
cuguggguucauuagcaucu

SEQ ID NO: 27011 - RNA, 20 nt, Artificial Sequence
  HTT spacer sequence GTCN PAM
cauaaccagaugcuaaugaa

SEQ ID NO: 27012 - RNA, 20 nt, Artificial Sequence
  HTT spacer sequence GTCN PAM
ccacgagccccuccaaagga

SEQ ID NO: 27013 - RNA, 20 nt, Artificial Sequence
  HTT spacer sequence GTCN PAM
ugaggucaugccguccagag

SEQ ID NO: 27014 - RNA, 20 nt, Artificial Sequence
  HTT spacer sequence GTCN PAM
ugccguccagagcacaccug

SEQ ID NO: 27015 - RNA, 20 nt, Artificial Sequence
  HTT spacer sequence GTCN PAM
agagcacaccugaggauagg

SEQ ID NO: 27016 - RNA, 20 nt, Artificial Sequence
  HTT spacer sequence GTCN PAM
uggccuauccucaggugugc

SEQ ID NO: 27017 - RNA, 20 nt, Artificial Sequence
  HTT spacer sequence GTCN PAM
ucuggaaggcagcuguaaca

SEQ ID NO: 27018 - RNA, 20 nt, Artificial Sequence
  HTT spacer sequence GTCN PAM
cucccuggguggguaccaga

SEQ ID NO: 27019 - RNA, 20 nt, Artificial Sequence
  HTT spacer sequence GTCN PAM
uuaucauagagcccccucug

SEQ ID NO: 27020 - RNA, 20 nt, Artificial Sequence
  HTT spacer sequence GTCN PAM
uuugucaccucacugaaggc

SEQ ID NO: 27021 - RNA, 20 nt, Artificial Sequence
  HTT spacer sequence GTCN PAM
ccucacugaaggcauguaag

SEQ ID NO: 27022 - RNA, 20 nt, Artificial Sequence
  HTT spacer sequence GTCN PAM
ggccagcucagcuuacaugc

SEQ ID NO: 27023 - RNA, 20 nt, Artificial Sequence
  HTT spacer sequence GTCN PAM
gagcaccucacgcacagaga

SEQ ID NO: 27024 - RNA, 20 nt, Artificial Sequence
  HTT spacer sequence GTCN PAM
aguucucugugcgugaggug

SEQ ID NO: 27025 - RNA, 20 nt, Artificial Sequence
  HTT spacer sequence GTCN PAM
cuaacuccugccugcuucuc

SEQ ID NO: 27026 - RNA, 20 nt, Artificial Sequence
  HTT spacer sequence GTCN PAM
ucauccugaggcugcuggca

SEQ ID NO: 27027 - RNA, 20 nt, Artificial Sequence
  HTT spacer sequence GTCN PAM
caggaagcaguuggagcugu

SEQ ID NO: 27028 - RNA, 20 nt, Artificial Sequence
  HTT spacer sequence GTCN PAM
cagagcuggcaccuucuccc

SEQ ID NO: 27029 - RNA, 20 nt, Artificial Sequence
  HTT spacer sequence GTCN PAM
ggcuuccugcuuccucacag

SEQ ID NO: 27030 - RNA, 20 nt, Artificial Sequence
  HTT spacer sequence GTCN PAM
guccugacucaacucggaug

SEQ ID NO: 27031 - RNA, 20 nt, Artificial Sequence
  HTT spacer sequence GTCN PAM
ugacucaacucggaugaugu

SEQ ID NO: 27032 - RNA, 20 nt, Artificial Sequence
  HTT spacer sequence GTCN PAM
ggacagacauacugugagga

SEQ ID NO: 27033 - RNA, 20 nt, Artificial Sequence
  HTT spacer sequence GTCN PAM
cuuccuuuucaucuucucag

SEQ ID NO: 27034 - RNA, 20 nt, Artificial Sequence
  HTT spacer sequence GTCN PAM
cccaaaccgggaggggauuu

SEQ ID NO: 27035 - RNA, 20 nt, Artificial Sequence
  HTT spacer sequence GTCN PAM
uuaaggaguucaucuaccgc

SEQ ID NO: 27036 - RNA, 20 nt, Artificial Sequence
  HTT spacer sequence GTCN PAM
ccauugucggacaucuaccg

SEQ ID NO: 27037 - RNA, 20 nt, Artificial Sequence
  HTT spacer sequence GTCN PAM
gacaucuaccgggaggaaau

SEQ ID NO: 27038 - RNA, 20 nt, Artificial Sequence
  HTT spacer sequence GTCN PAM
gacaauggugaccugaagga

SEQ ID NO: 27039 - RNA, 20 nt, Artificial Sequence
  HTT spacer sequence GTCN PAM
aaugagaagaucccaguacu

SEQ ID NO: 27040 - RNA, 20 nt, Artificial Sequence
  HTT spacer sequence GTCN PAM
ggaaagguucauguguagug

SEQ ID NO: 27041 - RNA, 20 nt, Artificial Sequence
  HTT spacer sequence GTCN PAM
acuacacaugaaccuuuccu

SEQ ID NO: 27042 - RNA, 20 nt, Artificial Sequence
  HTT spacer sequence GTCN PAM
cacguuguccacuacacaug

SEQ ID NO: 27043 - RNA, 20 nt, Artificial Sequence
  HTT spacer sequence GTCN PAM
cagaauguuuucuuguguuc

SEQ ID NO: 27044 - RNA, 20 nt, Artificial Sequence
  HTT spacer sequence GTCN PAM
gauccuguugugucucagug

SEQ ID NO: 27045 - RNA, 20 nt, Artificial Sequence
  HTT spacer sequence GTCN PAM
cagugguccauuuucucaua

SEQ ID NO: 27046 - RNA, 20 nt, Artificial Sequence
  HTT spacer sequence GTCN PAM
auuuucucauaugggaacaa

SEQ ID NO: 27047 - RNA, 20 nt, Artificial Sequence
  HTT spacer sequence GTCN PAM
gcuuguucccauaugagaaa

SEQ ID NO: 27048 - RNA, 20 nt, Artificial Sequence
  HTT spacer sequence GTCN PAM
gguuucuuggcacucgccuu

SEQ ID NO: 27049 - RNA, 20 nt, Artificial Sequence
  HTT spacer sequence GTCN PAM
gagccccaagccugcuuucu

SEQ ID NO: 27050 - RNA, 20 nt, Artificial Sequence
  HTT spacer sequence GTCN PAM
uggucugcuuccagcccucc

SEQ ID NO: 27051 - RNA, 20 nt, Artificial Sequence
  HTT spacer sequence GTCN PAM
gcuuccagcccuccuaccug

SEQ ID NO: 27052 - RNA, 20 nt, Artificial Sequence
  HTT spacer sequence GTCN PAM
gucuaaccucuagagacccu

SEQ ID NO: 27053 - RNA, 20 nt, Artificial Sequence
  HTT spacer sequence GTCN PAM
aaccucuagagacccucagu

SEQ ID NO: 27054 - RNA, 20 nt, Artificial Sequence
  HTT spacer sequence GTCN PAM
cuagagguuagacggacuug

SEQ ID NO: 27055 - RNA, 20 nt, Artificial Sequence
  HTT spacer sequence GTCN PAM
uauguaaaaugggggucgug

SEQ ID NO: 27056 - RNA, 20 nt, Artificial Sequence
  HTT spacer sequence GTCN PAM
ugucuauuucauagaauugu

SEQ ID NO: 27057 - RNA, 20 nt, Artificial Sequence
  HTT spacer sequence GTCN PAM
auuucauagaauuguugcag

SEQ ID NO: 27058 - RNA, 20 nt, Artificial Sequence
  HTT spacer sequence GTCN PAM
aaaugaauaagucaccacuu

SEQ ID NO: 27059 - RNA, 20 nt, Artificial Sequence
  HTT spacer sequence GTCN PAM
ccacuuuugccccuauuuga

SEQ ID NO: 27060 - RNA, 20 nt, Artificial Sequence
  HTT spacer sequence GTCN PAM
caccacaagaucacaccucu

SEQ ID NO: 27061 - RNA, 20 nt, Artificial Sequence
  HTT spacer sequence GTCN PAM
guucucagugacugugcccu

SEQ ID NO: 27062 - RNA, 20 nt, Artificial Sequence
  HTT spacer sequence GTCN PAM
cugagaacugacugauuaca

SEQ ID NO: 27063 - RNA, 20 nt, Artificial Sequence
  HTT spacer sequence GTCN PAM
uguccuagaaagucuggcag

SEQ ID NO: 27064 - RNA, 20 nt, Artificial Sequence
  HTT spacer sequence GTCN PAM
uagaaagucuggcaggggca

SEQ ID NO: 27065 - RNA, 20 nt, Artificial Sequence
  HTT spacer sequence GTCN PAM
ggcaggggcacccugacucc

SEQ ID NO: 27066 - RNA, 20 nt, Artificial Sequence
  HTT spacer sequence GTCN PAM
gggugccccugccagacuuu

SEQ ID NO: 27067 - RNA, 20 nt, Artificial Sequence
  HTT spacer sequence GTCN PAM
aguccucuccccagucccuc

SEQ ID NO: 27068 - RNA, 20 nt, Artificial Sequence
  HTT spacer sequence GTCN PAM
ucuccccagucccucgggcu

SEQ ID NO: 27069 - RNA, 20 nt, Artificial Sequence
  HTT spacer sequence GTCN PAM
cucgggcuucugcagauuug

SEQ ID NO: 27070 - RNA, 20 nt, Artificial Sequence
  HTT spacer sequence GTCN PAM
ccugccacaaccuucuggga

SEQ ID NO: 27071 - RNA, 20 nt, Artificial Sequence
  HTT spacer sequence GTCN PAM
aaagagagcccugagcaggu

SEQ ID NO: 27072 - RNA, 20 nt, Artificial Sequence
  HTT spacer sequence GTCN PAM
gaugggcaguucaagagcaa

SEQ ID NO: 27073 - RNA, 20 nt, Artificial Sequence
  HTT spacer sequence GTCN PAM
cgcacguccgaugggcaguu

SEQ ID NO: 27074 - RNA, 20 nt, Artificial Sequence
  HTT spacer sequence GTCN PAM
ugggucacgcacguccgaug

SEQ ID NO: 27075 - RNA, 20 nt, Artificial Sequence
  HTT spacer sequence GTCN PAM
uugccuugucugugcucauu

SEQ ID NO: 27076 - RNA, 20 nt, Artificial Sequence
  HTT spacer sequence GTCN PAM
gugcucauuuucuuuguuca

SEQ ID NO: 27077 - RNA, 20 nt, Artificial Sequence
  HTT spacer sequence GTCN PAM
guaucugugucugaaucagu

SEQ ID NO: 27078 - RNA, 20 nt, Artificial Sequence
  HTT spacer sequence GTCN PAM
gaaucaguccugcacgcucu

SEQ ID NO: 27079 - RNA, 20 nt, Artificial Sequence
  HTT spacer sequence GTCN PAM
ugcacgcucuccuucucucu

SEQ ID NO: 27080 - RNA, 20 nt, Artificial Sequence
  HTT spacer sequence GTCN PAM
cuuguucuuucuuuaccccg

SEQ ID NO: 27081 - RNA, 20 nt, Artificial Sequence
  HTT spacer sequence GTCN PAM
ccgugauaaacgggguaaag

SEQ ID NO: 27082 - RNA, 20 nt, Artificial Sequence
  HTT spacer sequence GTCN PAM
auugcucuaguucuccuguc

SEQ ID NO: 27083 - RNA, 20 nt, Artificial Sequence
  HTT spacer sequence GTCN PAM
uaagcaccccaucccgucuc

SEQ ID NO: 27084 - RNA, 20 nt, Artificial Sequence
  HTT spacer sequence GTCN PAM
cucuggccuuaccacaagug

SEQ ID NO: 27085 - RNA, 20 nt, Artificial Sequence
  HTT spacer sequence GTCN PAM
gaggcagccacgccacuugu

SEQ ID NO: 27086 - RNA, 20 nt, Artificial Sequence
  HTT spacer sequence GTCN PAM
ccaucaugaugucugaggca

SEQ ID NO: 27087 - RNA, 20 nt, Artificial Sequence
  HTT spacer sequence GTCN PAM
gaaacaacuguucguuagau

SEQ ID NO: 27088 - RNA, 20 nt, Artificial Sequence
  HTT spacer sequence GTCN PAM
gucggauguauuuucacuga

SEQ ID NO: 27089 - RNA, 20 nt, Artificial Sequence
  HTT spacer sequence GTCN PAM
gauguauuuucacugaaucc

SEQ ID NO: 27090 - RNA, 20 nt, Artificial Sequence
  HTT spacer sequence GTCN PAM
agaagaauagauuaaaaaga

SEQ ID NO: 27091 - RNA, 20 nt, Artificial Sequence
  HTT spacer sequence GTCN PAM
gaggaaccauuacuuugacu

SEQ ID NO: 27092 - RNA, 20 nt, Artificial Sequence
  HTT spacer sequence GTCN PAM
aaguaaugguuccucugacc

SEQ ID NO: 27093 - RNA, 20 nt, Artificial Sequence
  HTT spacer sequence GTCN PAM
gcuuagagugggugaaaucu

SEQ ID NO: 27094 - RNA, 20 nt, Artificial Sequence
  HTT spacer sequence GTCN PAM
cagggcuggacuccagggaa

SEQ ID NO: 27095 - RNA, 20 nt, Artificial Sequence
  HTT spacer sequence GTCN PAM
agcccugagacugugcagcu

SEQ ID NO: 27096 - RNA, 20 nt, Artificial Sequence
  HTT spacer sequence GTCN PAM
cugcccugucccugugucug

SEQ ID NO: 27097 - RNA, 20 nt, Artificial Sequence
  HTT spacer sequence GTCN PAM
cugugucugcuccacugggg

SEQ ID NO: 27098 - RNA, 20 nt, Artificial Sequence
  HTT spacer sequence GTCN PAM
gcuccacuggggguugacca

SEQ ID NO: 27099 - RNA, 20 nt, Artificial Sequence
  HTT spacer sequence GTCN PAM
acccccaguggagcagacac

SEQ ID NO: 27100 - RNA, 20 nt, Artificial Sequence
  HTT spacer sequence GTCN PAM
gcccuggcagccuggucaac

SEQ ID NO: 27101 - RNA, 20 nt, Artificial Sequence
  HTT spacer sequence GTCN PAM
cggacagugcagccgauguc

SEQ ID NO: 27102 - RNA, 20 nt, Artificial Sequence
  HTT spacer sequence GTCN PAM
gagacacaugagaggcaggu

SEQ ID NO: 27103 - RNA, 20 nt, Artificial Sequence
  HTT spacer sequence GTCN PAM
auacuucgguuuccucaaug

SEQ ID NO: 27104 - RNA, 20 nt, Artificial Sequence
  HTT spacer sequence GTCN PAM
cuuaaaccucacacaguucu

SEQ ID NO: 27105 - RNA, 20 nt, Artificial Sequence
  HTT spacer sequence GTCN PAM
gcguagcugucagcucuccg

SEQ ID NO: 27106 - RNA, 20 nt, Artificial Sequence
  HTT spacer sequence GTCN PAM
gcucuccguuacaggcuuga

SEQ ID NO: 27107 - RNA, 20 nt, Artificial Sequence
  HTT spacer sequence GTCN PAM
acccuucucaagccuguaac

SEQ ID NO: 27108 - RNA, 20 nt, Artificial Sequence
  HTT spacer sequence GTCN PAM
agccuagaaauauaaauguu

SEQ ID NO: 27109 - RNA, 20 nt, Artificial Sequence
  HTT spacer sequence GTCN PAM
uacucaguuugaagaaacuu

SEQ ID NO: 27110 - RNA, 20 nt, Artificial Sequence
  HTT spacer sequence GTCN PAM
uggugacgcagccccucgug

SEQ ID NO: 27111 - RNA, 20 nt, Artificial Sequence
  HTT spacer sequence GTCN PAM
ccaggacaccaaggagggug

SEQ ID NO: 27112 - RNA, 20 nt, Artificial Sequence
  HTT spacer sequence GTCN PAM
ugacugauauuccagagcag

SEQ ID NO: 27113 - RNA, 20 nt, Artificial Sequence
  HTT spacer sequence GTCN PAM
agacaccauucagcuacucu

SEQ ID NO: 27114 - RNA, 20 nt, Artificial Sequence
  HTT spacer sequence GTCN PAM
cugcucuggaauaucaguca

SEQ ID NO: 27115 - RNA, 20 nt, Artificial Sequence
  HTT spacer sequence GTCN PAM
gggggcugcgauuaccaaug

SEQ ID NO: 27116 - RNA, 20 nt, Artificial Sequence
  HTT spacer sequence GTCN PAM
ugcagagauuuuaucaggcu

SEQ ID NO: 27117 - RNA, 20 nt, Artificial Sequence
  HTT spacer sequence GTCN PAM
uuucugugaguucaaaccac

SEQ ID NO: 27118 - RNA, 20 nt, Artificial Sequence
  HTT spacer sequence GTCN PAM
acccuccaaacugucauuuc

SEQ ID NO: 27119 - RNA, 20 nt, Artificial Sequence
  HTT spacer sequence GTCN PAM
caagucaucaagauugucuu

SEQ ID NO: 27120 - RNA, 20 nt, Artificial Sequence
  HTT spacer sequence GTCN PAM
ucaagauugucuuuaaauuc

SEQ ID NO: 27121 - RNA, 20 nt, Artificial Sequence
  HTT spacer sequence GTCN PAM
uuaaauucaugcauagaagc

SEQ ID NO: 27122 - RNA, 20 nt, Artificial Sequence
  HTT spacer sequence GTCN PAM
uaagcaaggccuguaaaaug

SEQ ID NO: 27123 - RNA, 20 nt, Artificial Sequence
  HTT spacer sequence GTCN PAM
uugauuugaaaaaugggcuu

SEQ ID NO: 27124 - RNA, 20 nt, Artificial Sequence
  HTT spacer sequence GTCN PAM
ggcugagcucacggggcaca

SEQ ID NO: 27125 - RNA, 20 nt, Artificial Sequence
  HTT spacer sequence GTCN PAM
ucccugccucaaugggagga

SEQ ID NO: 27126 - RNA, 20 nt, Artificial Sequence
  HTT spacer sequence GTCN PAM
ugcugcucuuguugacaugu

SEQ ID NO: 27127 - RNA, 20 nt, Artificial Sequence
  HTT spacer sequence GTCN PAM
acaagagcagcaagacaccc

SEQ ID NO: 27128 - RNA, 20 nt, Artificial Sequence
  HTT spacer sequence GTCN PAM
uccuggaaggagagcccaca

SEQ ID NO: 27129 - RNA, 20 nt, Artificial Sequence
  HTT spacer sequence GTCN PAM
ucucugugucuuccuggaag

SEQ ID NO: 27130 - RNA, 20 nt, Artificial Sequence
  HTT spacer sequence GTCN PAM
uggccgugcaggccaucacc

SEQ ID NO: 27131 - RNA, 20 nt, Artificial Sequence
  HTT spacer sequence GTCN PAM
uugcacugagcaccagugag

SEQ ID NO: 27132 - RNA, 20 nt, Artificial Sequence
  HTT spacer sequence GTCN PAM
agagcuuucagaggcuuguu

SEQ ID NO: 27133 - RNA, 20 nt, Artificial Sequence
  HTT spacer sequence GTCN PAM
cugggacauagcaggugcug

SEQ ID NO: 27134 - RNA, 20 nt, Artificial Sequence
  HTT spacer sequence GTCN PAM
cagagacacgugggaacuca

SEQ ID NO: 27135 - RNA, 20 nt, Artificial Sequence
  HTT spacer sequence GTCN PAM
ccagcaccugcuauguccca

SEQ ID NO: 27136 - RNA, 20 nt, Artificial Sequence
  HTT spacer sequence GTCN PAM
agcagcuucaaccaggccgu

SEQ ID NO: 27137 - RNA, 20 nt, Artificial Sequence
  HTT spacer sequence GTCN PAM
guguggccugugcaggagau

SEQ ID NO: 27138 - RNA, 20 nt, Artificial Sequence
  HTT spacer sequence GTCN PAM
gcaucuccugcacaggccac

SEQ ID NO: 27139 - RNA, 20 nt, Artificial Sequence
  HTT spacer sequence GTCN PAM
gugagaagcuggaaacguga

SEQ ID NO: 27140 - RNA, 20 nt, Artificial Sequence
  HTT spacer sequence GTCN PAM
cguuuccagcuucucacuga

SEQ ID NO: 27141 - RNA, 20 nt, Artificial Sequence
  HTT spacer sequence GTCN PAM
guuccugucacguuuccagc

SEQ ID NO: 27142 - RNA, 20 nt, Artificial Sequence
  HTT spacer sequence GTCN PAM
uccccuaaaugcucaauaac

SEQ ID NO: 27143 - RNA, 20 nt, Artificial Sequence
  HTT spacer sequence GTCN PAM
gugagcccuuaagugggugu

SEQ ID NO: 27144 - RNA, 20 nt, Artificial Sequence
  HTT spacer sequence GTCN PAM
cuucucugucuccggcuacu

SEQ ID NO: 27145 - RNA, 20 nt, Artificial Sequence
  HTT spacer sequence GTCN PAM
ccggcuacuacagguaccug

SEQ ID NO: 27146 - RNA, 20 nt, Artificial Sequence
  HTT spacer sequence GTCN PAM
ucucucauucuagcccaagu

SEQ ID NO: 27147 - RNA, 20 nt, Artificial Sequence
  HTT spacer sequence GTCN PAM
ucccgcaucacugguguggu

SEQ ID NO: 27148 - RNA, 20 nt, Artificial Sequence
  HTT spacer sequence GTCN PAM
gaguuggaggcuguggugcu

SEQ ID NO: 27149 - RNA, 20 nt, Artificial Sequence
  HTT spacer sequence GTCN PAM
uagucaggcccagggaggaa

SEQ ID NO: 27150 - RNA, 20 nt, Artificial Sequence
  HTT spacer sequence GTCN PAM
ggcccagggaggaaguaaaa

SEQ ID NO: 27151 - RNA, 20 nt, Artificial Sequence
  HTT spacer sequence GTCN PAM
agaaaugagaagcgaaagaa

SEQ ID NO: 27152 - RNA, 20 nt, Artificial Sequence
  HTT spacer sequence GTCN PAM
uacagcccgugagaauucuu

SEQ ID NO: 27153 - RNA, 20 nt, Artificial Sequence
  HTT spacer sequence GTCN PAM
cugcccacucucccaccaag

SEQ ID NO: 27154 - RNA, 20 nt, Artificial Sequence
  HTT spacer sequence GTCN PAM
ccugguuuaaaagaagagag

SEQ ID NO: 27155 - RNA, 20 nt, Artificial Sequence
  HTT spacer sequence GTCN PAM
acauagaacuuucugcaauu

SEQ ID NO: 27156 - RNA, 20 nt, Artificial Sequence
  HTT spacer sequence GTCN PAM
augagacucaaauguuuauu

SEQ ID NO: 27157 - RNA, 20 nt, Artificial Sequence
  HTT spacer sequence GTCN PAM
cauagacacugcguauaaca

SEQ ID NO: 27158 - RNA, 20 nt, Artificial Sequence
  HTT spacer sequence GTCN PAM
ggaggacccaggagcaauga

SEQ ID NO: 27159 - RNA, 20 nt, Artificial Sequence
  HTT spacer sequence GTCN PAM
uccugacuuaugagcuccuu

SEQ ID NO: 27160 - RNA, 20 nt, Artificial Sequence
  HTT spacer sequence GTCN PAM
uugcuccuggguccuccuga

SEQ ID NO: 27161 - RNA, 20 nt, Artificial Sequence
  HTT spacer sequence GTCN PAM
uagaaggcagaaaagagggg

SEQ ID NO: 27162 - RNA, 20 nt, Artificial Sequence
  HTT spacer sequence GTCN PAM
ggcagaggguuagcugggga

SEQ ID NO: 27163 - RNA, 20 nt, Artificial Sequence
  HTT spacer sequence GTCN PAM
ccagcuaacccucugccaga

SEQ ID NO: 27164 - RNA, 20 nt, Artificial Sequence
  HTT spacer sequence GTCN PAM
uucugcugggcaucccccca

SEQ ID NO: 27165 - RNA, 20 nt, Artificial Sequence
  HTT spacer sequence GTCN PAM
gccugggcaccgaggugggg

SEQ ID NO: 27166 - RNA, 20 nt, Artificial Sequence
  HTT spacer sequence GTCN PAM
cccagagagcuugccugccu

SEQ ID NO: 27167 - RNA, 20 nt, Artificial Sequence
  HTT spacer sequence GTCN PAM
aggcaggcaagcucucuggg

SEQ ID NO: 27168 - RNA, 20 nt, Artificial Sequence
  HTT spacer sequence GTCN PAM
gcucgccugcaacugcugac

SEQ ID NO: 27169 - RNA, 20 nt, Artificial Sequence
  HTT spacer sequence GTCN PAM
gcaguugcaggcgagccgac

SEQ ID NO: 27170 - RNA, 20 nt, Artificial Sequence
  HTT spacer sequence GTCN PAM
ccccucagcucccaccucug

SEQ ID NO: 27171 - RNA, 20 nt, Artificial Sequence
  HTT spacer sequence GTCN PAM
cuugucaccccucagcuccc

SEQ ID NO: 27172 - RNA, 20 nt, Artificial Sequence
  HTT spacer sequence GTCN PAM
uauuugucauagagaaaaag

SEQ ID NO: 27173 - RNA, 20 nt, Artificial Sequence
  HTT spacer sequence GTCN PAM
uagagaaaaagugacagagu

SEQ ID NO: 27174 - RNA, 20 nt, Artificial Sequence
  HTT spacer sequence GTCN PAM
cuuuuucucuaugacaaaua

SEQ ID NO: 27175 - RNA, 20 nt, Artificial Sequence
  HTT spacer sequence GTCN PAM
agcuugcccacuggcccugc

SEQ ID NO: 27176 - RNA, 20 nt, Artificial Sequence
  HTT spacer sequence GTCN PAM
cuuuauaaccaguuaagcug

SEQ ID NO: 27177 - RNA, 20 nt, Artificial Sequence
  HTT spacer sequence GTCN PAM
uggggauuugucacuuuaua

SEQ ID NO: 27178 - RNA, 20 nt, Artificial Sequence
  HTT spacer sequence GTCN PAM
gggcaggagcugggcuggua

SEQ ID NO: 27179 - RNA, 20 nt, Artificial Sequence
  HTT spacer sequence GTCN PAM
ugaucugcacaggggggcag

SEQ ID NO: 27180 - RNA, 20 nt, Artificial Sequence
  HTT spacer sequence GTCN PAM
gucucgcgcccccgccgccu

SEQ ID NO: 27181 - RNA, 20 nt, Artificial Sequence
  HTT spacer sequence GTCN PAM
cgcgcccccgccgccuggcc

SEQ ID NO: 27182 - RNA, 20 nt, Artificial Sequence
  HTT spacer sequence GTCN PAM
guuucuguccucagacuuug

SEQ ID NO: 27183 - RNA, 20 nt, Artificial Sequence
  HTT spacer sequence GTCN PAM
ucagacuuuggcgcuugaca

SEQ ID NO: 27184 - RNA, 20 nt, Artificial Sequence
  HTT spacer sequence GTCN PAM
gaggacagaaacggacagag

SEQ ID NO: 27185 - RNA, 20 nt, Artificial Sequence
  HTT spacer sequence GTCN PAM
agcgccaaagucugaggaca

SEQ ID NO: 27186 - RNA, 20 nt, Artificial Sequence
  HTT spacer sequence GTCN PAM
cgcaagcagaggaagcauua

SEQ ID NO: 27187 - RNA, 20 nt, Artificial Sequence
  HTT spacer sequence GTCN PAM
cuuaacuacuuucuggaaua

SEQ ID NO: 27188 - RNA, 20 nt, Artificial Sequence
  HTT spacer sequence GTCN PAM
cuuacacacaucucuaucgc

SEQ ID NO: 27189 - RNA, 20 nt, Artificial Sequence
  HTT spacer sequence GTCN PAM
cgcccucucacugucucuua

SEQ ID NO: 27190 - RNA, 20 nt, Artificial Sequence
  HTT spacer sequence GTCN PAM
aagucacgcccucucacugu

SEQ ID NO: 27191 - RNA, 20 nt, Artificial Sequence
  HTT spacer sequence GTCN PAM
uugcuuaaguccaagucacg

SEQ ID NO: 27192 - RNA, 20 nt, Artificial Sequence
  HTT spacer sequence GTCN PAM
cacgguccuugcuuaagucc

SEQ ID NO: 27193 - RNA, 20 nt, Artificial Sequence
  HTT spacer sequence GTCN PAM
ucaccccccuuuuugugucu

SEQ ID NO: 27194 - RNA, 20 nt, Artificial Sequence
  HTT spacer sequence GTCN PAM
gcugaaaugcucaggaggaa

SEQ ID NO: 27195 - RNA, 20 nt, Artificial Sequence
  HTT spacer sequence GTCN PAM
acuuccuccugagcauuuca

SEQ ID NO: 27196 - RNA, 20 nt, Artificial Sequence
  HTT spacer sequence GTCN PAM
cuggggccagcucuuggggg

SEQ ID NO: 27197 - RNA, 20 nt, Artificial Sequence
  HTT spacer sequence GTCN PAM
cugucccuguggccaguucu

SEQ ID NO: 27198 - RNA, 20 nt, Artificial Sequence
  HTT spacer sequence GTCN PAM
cuguggccaguucugggugg

SEQ ID NO: 27199 - RNA, 20 nt, Artificial Sequence
  HTT spacer sequence GTCN PAM
gccugcacacggggcuccca

SEQ ID NO: 27200 - RNA, 20 nt, Artificial Sequence
  HTT spacer sequence GTCN PAM
cauuggucugugcuucuguu

SEQ ID NO: 27201 - RNA, 20 nt, Artificial Sequence
  HTT spacer sequence GTCN PAM
gugcuucuguuuccuccuca

SEQ ID NO: 27202 - RNA, 20 nt, Artificial Sequence
  HTT spacer sequence GTCN PAM
gggugugguggcuaacaccu

SEQ ID NO: 27203 - RNA, 20 nt, Artificial Sequence
  HTT spacer sequence GTCN PAM
guugcccaggcuggagugca

SEQ ID NO: 27204 - RNA, 20 nt, Artificial Sequence
  HTT spacer sequence GTCN PAM
cuuaaaaaaaaauguaaaca

SEQ ID NO: 27205 - RNA, 20 nt, Artificial Sequence
  HTT spacer sequence GTCN PAM
gccagcacagccgggccccg

SEQ ID NO: 27206 - RNA, 20 nt, Artificial Sequence
  HTT spacer sequence GTCN PAM
uucgcucaccggguuccuga

SEQ ID NO: 27207 - RNA, 20 nt, Artificial Sequence
  HTT spacer sequence GTCN PAM
ugcacaacugcuuucacuaa

SEQ ID NO: 27208 - RNA, 20 nt, Artificial Sequence
  HTT spacer sequence GTCN PAM
gaauaugguguuuagaaaca

SEQ ID NO: 27209 - RNA, 20 nt, Artificial Sequence
  HTT spacer sequence GTCN PAM
caagccuguuucuguucccu

SEQ ID NO: 27210 - RNA, 20 nt, Artificial Sequence
  HTT spacer sequence GTCN PAM
uguuuugugccugccgguuu

SEQ ID NO: 27211 - RNA, 20 nt, Artificial Sequence
  HTT spacer sequence GTCN PAM
cugaaaccggcaggcacaaa

SEQ ID NO: 27212 - RNA, 20 nt, Artificial Sequence
  HTT spacer sequence GTCN PAM
aguagcucccugcuuccugu

SEQ ID NO: 27213 - RNA, 20 nt, Artificial Sequence
  HTT spacer sequence GTCN PAM
agaaaaauacaggcuggucc

SEQ ID NO: 27214 - RNA, 20 nt, Artificial Sequence
  HTT spacer sequence GTCN PAM
cacucuucuguccuuucacc

SEQ ID NO: 27215 - RNA, 20 nt, Artificial Sequence
  HTT spacer sequence GTCN PAM
uuucaccuuugacagauguu

SEQ ID NO: 27216 - RNA, 20 nt, Artificial Sequence
  HTT spacer sequence GTCN PAM
aaggugaaaggacagaagag

SEQ ID NO: 27217 - RNA, 20 nt, Artificial Sequence
  HTT spacer sequence GTCN PAM
uuuucacuuaucuuggggug

SEQ ID NO: 27218 - RNA, 20 nt, Artificial Sequence
  HTT spacer sequence GTCN PAM
ugggcccagggacacugguc

SEQ ID NO: 27219 - RNA, 20 nt, Artificial Sequence
  HTT spacer sequence GTCN PAM
cugggcccaggacaaggcca

SEQ ID NO: 27220 - RNA, 20 nt, Artificial Sequence
  HTT spacer sequence GTCN PAM
gugcccgagguauucccuau

SEQ ID NO: 27221 - RNA, 20 nt, Artificial Sequence
  HTT spacer sequence GTCN PAM
agcguccgcaaaccaacugu

SEQ ID NO: 27222 - RNA, 20 nt, Artificial Sequence
  HTT spacer sequence GTCN PAM
gcaaaccaacugucauggga

SEQ ID NO: 27223 - RNA, 20 nt, Artificial Sequence
  HTT spacer sequence GTCN PAM
ugggaucauacuggggcuga

SEQ ID NO: 27224 - RNA, 20 nt, Artificial Sequence
  HTT spacer sequence GTCN PAM
caccccugcccugucugggg

SEQ ID NO: 27225 - RNA, 20 nt, Artificial Sequence
  HTT spacer sequence GTCN PAM
ggggcugaaguacagugcca

SEQ ID NO: 27226 - RNA, 20 nt, Artificial Sequence
  HTT spacer sequence GTCN PAM
ggggcugaaggacagugcca

SEQ ID NO: 27227 - RNA, 20 nt, Artificial Sequence
  HTT spacer sequence GTCN PAM
uucagccccagacagggcag

SEQ ID NO: 27228 - RNA, 20 nt, Artificial Sequence
  HTT spacer sequence GTCN PAM
ggggcugaaguacagugcca

SEQ ID NO: 27229 - RNA, 20 nt, Artificial Sequence
  HTT spacer sequence GTCN PAM
ggggcugaaggacagugcca

SEQ ID NO: 27230 - RNA, 20 nt, Artificial Sequence
  HTT spacer sequence GTCN PAM
uucagccccagacagggcag

SEQ ID NO: 27231 - RNA, 20 nt, Artificial Sequence
  HTT spacer sequence GTCN PAM
ggggcugaaggacagugcca

SEQ ID NO: 27232 - RNA, 20 nt, Artificial Sequence
  HTT spacer sequence GTCN PAM
uucagccccagacagggaag

SEQ ID NO: 27233 - RNA, 20 nt, Artificial Sequence
  HTT spacer sequence GTCN PAM
ggggcugaaggacagugcca

SEQ ID NO: 27234 - RNA, 20 nt, Artificial Sequence
  HTT spacer sequence GTCN PAM
uucagccccagacagggcag

SEQ ID NO: 27235 - RNA, 20 nt, Artificial Sequence
  HTT spacer sequence GTCN PAM
ggggcugaaggacagugcca

SEQ ID NO: 27236 - RNA, 20 nt, Artificial Sequence
  HTT spacer sequence GTCN PAM
uucagccccagacagggcag

SEQ ID NO: 27237 - RNA, 20 nt, Artificial Sequence
  HTT spacer sequence GTCN PAM
ggggcugaaggacagugcca

SEQ ID NO: 27238 - RNA, 20 nt, Artificial Sequence
  HTT spacer sequence GTCN PAM
uucagccccagacagggcag

SEQ ID NO: 27239 - RNA, 20 nt, Artificial Sequence
  HTT spacer sequence GTCN PAM
ggggcugaaggacagugcca

SEQ ID NO: 27240 - RNA, 20 nt, Artificial Sequence
  HTT spacer sequence GTCN PAM
uucagccccagacagggcag

SEQ ID NO: 27241 - RNA, 20 nt, Artificial Sequence
  HTT spacer sequence GTCN PAM
ggggcugaaggacagugcca

SEQ ID NO: 27242 - RNA, 20 nt, Artificial Sequence
  HTT spacer sequence GTCN PAM
uucagccccagacagggcag

SEQ ID NO: 27243 - RNA, 20 nt, Artificial Sequence
  HTT spacer sequence GTCN PAM
ggggcugaaggacagugcca

SEQ ID NO: 27244 - RNA, 20 nt, Artificial Sequence
  HTT spacer sequence GTCN PAM
uucagccccagacagggcag

SEQ ID NO: 27245 - RNA, 20 nt, Artificial Sequence
  HTT spacer sequence GTCN PAM
ggggcugaaggacagugcca

SEQ ID NO: 27246 - RNA, 20 nt, Artificial Sequence
  HTT spacer sequence GTCN PAM
uucagccccagacagggcag

SEQ ID NO: 27247 - RNA, 20 nt, Artificial Sequence
  HTT spacer sequence GTCN PAM
ggggcugaaggacagugcca

SEQ ID NO: 27248 - RNA, 20 nt, Artificial Sequence
  HTT spacer sequence GTCN PAM
uucagccccagacagggcag

SEQ ID NO: 27249 - RNA, 20 nt, Artificial Sequence
  HTT spacer sequence GTCN PAM
ggggcugaaggacagugcca

SEQ ID NO: 27250 - RNA, 20 nt, Artificial Sequence
  HTT spacer sequence GTCN PAM
uucagccccagacagggcag

SEQ ID NO: 27251 - RNA, 20 nt, Artificial Sequence
  HTT spacer sequence GTCN PAM
ggggcugaaggacagugcca

SEQ ID NO: 27252 - RNA, 20 nt, Artificial Sequence
  HTT spacer sequence GTCN PAM
uucagccccagacagggcag

SEQ ID NO: 27253 - RNA, 20 nt, Artificial Sequence
  HTT spacer sequence GTCN PAM
ggggcugaaggacagugcca

SEQ ID NO: 27254 - RNA, 20 nt, Artificial Sequence
  HTT spacer sequence GTCN PAM
uucagccccagacagggcag

SEQ ID NO: 27255 - RNA, 20 nt, Artificial Sequence
  HTT spacer sequence GTCN PAM
ggggcugaaggacagugcca

SEQ ID NO: 27256 - RNA, 20 nt, Artificial Sequence
  HTT spacer sequence GTCN PAM
uucagccccagacagggcag

SEQ ID NO: 27257 - RNA, 20 nt, Artificial Sequence
  HTT spacer sequence GTCN PAM
ggggcugaaggacagugcca

SEQ ID NO: 27258 - RNA, 20 nt, Artificial Sequence
  HTT spacer sequence GTCN PAM
uucagccccagacagggcag

SEQ ID NO: 27259 - RNA, 20 nt, Artificial Sequence
  HTT spacer sequence GTCN PAM
gggauguuuagccccuagau

SEQ ID NO: 27260 - RNA, 20 nt, Artificial Sequence
  HTT spacer sequence GTCN PAM
aguggcaucuaggggcuaaa

SEQ ID NO: 27261 - RNA, 20 nt, Artificial Sequence
  HTT spacer sequence GTCN PAM
gggcgaggggagugcagggg

SEQ ID NO: 27262 - RNA, 20 nt, Artificial Sequence
  HTT spacer sequence GTCN PAM
guaugaacagcucucaggcc

SEQ ID NO: 27263 - RNA, 20 nt, Artificial Sequence
  HTT spacer sequence GTCN PAM
caggggggaaauggcccuug

SEQ ID NO: 27264 - RNA, 20 nt, Artificial Sequence
  HTT spacer sequence GTCN PAM
uccuuucugccugguucucg

SEQ ID NO: 27265 - RNA, 20 nt, Artificial Sequence
  HTT spacer sequence GTCN PAM
aggugugcugacugcguggu

SEQ ID NO: 27266 - RNA, 20 nt, Artificial Sequence
  HTT spacer sequence GTCN PAM
gcacaccucgacuguccucc

SEQ ID NO: 27267 - RNA, 20 nt, Artificial Sequence
  HTT spacer sequence GTCN PAM
caaaggcgcgagggagcucu

SEQ ID NO: 27268 - RNA, 20 nt, Artificial Sequence
  HTT spacer sequence GTCN PAM
uugcgguaaacccaaggcca

SEQ ID NO: 27269 - RNA, 20 nt, Artificial Sequence
  HTT spacer sequence GTCN PAM
cccgcacuggcagucauugc

SEQ ID NO: 27270 - RNA, 20 nt, Artificial Sequence
  HTT spacer sequence GTCN PAM
ccaaaacacggaaccaauac

SEQ ID NO: 27271 - RNA, 20 nt, Artificial Sequence
  HTT spacer sequence GTCN PAM
cuuaggagugaaagcauccc

SEQ ID NO: 27272 - RNA, 20 nt, Artificial Sequence
  HTT spacer sequence GTCN PAM
cccuccucagcugcuccugg

SEQ ID NO: 27273 - RNA, 20 nt, Artificial Sequence
  HTT spacer sequence GTCN PAM
accccaggagcagcugagga

SEQ ID NO: 27274 - RNA, 20 nt, Artificial Sequence
  HTT spacer sequence GTCN PAM
agccccugccccacccucuc

SEQ ID NO: 27275 - RNA, 20 nt, Artificial Sequence
  HTT spacer sequence GTCN PAM
gaacgacccuugcuaagggg

SEQ ID NO: 27276 - RNA, 20 nt, Artificial Sequence
  HTT spacer sequence GTCN PAM
uucagacaccccagguuacg

SEQ ID NO: 27277 - RNA, 20 nt, Artificial Sequence
  HTT spacer sequence GTCN PAM
gccccuuagcaagggucguu

SEQ ID NO: 27278 - RNA, 20 nt, Artificial Sequence
  HTT spacer sequence GTCN PAM
aacagucugccccuuagcaa

SEQ ID NO: 27279 - RNA, 20 nt, Artificial Sequence
  HTT spacer sequence GTCN PAM
caguggccacacccacccac

SEQ ID NO: 27280 - RNA, 20 nt, Artificial Sequence
  HTT spacer sequence GTCN PAM
auacacuccguguggcuggg

SEQ ID NO: 27281 - RNA, 20 nt, Artificial Sequence
  HTT spacer sequence GTCN PAM
cauuccuccucccucagggg

SEQ ID NO: 27282 - RNA, 20 nt, Artificial Sequence
  HTT spacer sequence GTCN PAM
gccuccuccuccucuuccuc

SEQ ID NO: 27283 - RNA, 20 nt, Artificial Sequence
  HTT spacer sequence GTCN PAM
ccacccacgucuccagucaa

SEQ ID NO: 27284 - RNA, 20 nt, Artificial Sequence
  HTT spacer sequence GTCN PAM
ccagucaacuccagguuuuc

SEQ ID NO: 27285 - RNA, 20 nt, Artificial Sequence
  HTT spacer sequence GTCN PAM
acuccagguuuuccaauggc

SEQ ID NO: 27286 - RNA, 20 nt, Artificial Sequence
  HTT spacer sequence GTCN PAM
uuugauuuguuugaggugcu

SEQ ID NO: 27287 - RNA, 20 nt, Artificial Sequence
  HTT spacer sequence GTCN PAM
acuccagcccgguguuuccu

SEQ ID NO: 27288 - RNA, 20 nt, Artificial Sequence
  HTT spacer sequence GTCN PAM
agcucagccaggaggacccc

SEQ ID NO: 27289 - RNA, 20 nt, Artificial Sequence
  HTT spacer sequence GTCN PAM
uccuggcugagcuggacggc

SEQ ID NO: 27290 - RNA, 20 nt, Artificial Sequence
  HTT spacer sequence GTCN PAM
gauccguaagugagccuucc

SEQ ID NO: 27291 - RNA, 20 nt, Artificial Sequence
  HTT spacer sequence GTCN PAM
auggugcguguggccugugu

SEQ ID NO: 27292 - RNA, 20 nt, Artificial Sequence
  HTT spacer sequence GTCN PAM
ggugcaugcacauguggcau

SEQ ID NO: 27293 - RNA, 20 nt, Artificial Sequence
  HTT spacer sequence GTCN PAM
gugugggugcgugguacacg

SEQ ID NO: 27294 - RNA, 20 nt, Artificial Sequence
  HTT spacer sequence GTCN PAM
cgcacaguaaugucucuugg

SEQ ID NO: 27295 - RNA, 20 nt, Artificial Sequence
  HTT spacer sequence GTCN PAM
cuuggguguaagaacacgac

SEQ ID NO: 27296 - RNA, 20 nt, Artificial Sequence
  HTT spacer sequence GTCN PAM
uguucuuacacccaagagac

SEQ ID NO: 27297 - RNA, 20 nt, Artificial Sequence
  HTT spacer sequence GTCN PAM
cagacuuguucaccgagcgc

SEQ ID NO: 27298 - RNA, 20 nt, Artificial Sequence
  HTT spacer sequence GTCN PAM
gagaccacuagaagcuggag

SEQ ID NO: 27299 - RNA, 20 nt, Artificial Sequence
  HTT spacer sequence GTCN PAM
cauacaucagcucaaacugg

SEQ ID NO: 27300 - RNA, 20 nt, Artificial Sequence
  HTT spacer sequence GTCN PAM
gcgucacauacaucagcuca

SEQ ID NO: 27301 - RNA, 20 nt, Artificial Sequence
  HTT spacer sequence GTCN PAM
ucugaagggugcacccuucg

SEQ ID NO: 27302 - RNA, 20 nt, Artificial Sequence
  HTT spacer sequence GTCN PAM
uugggaugguaagugacagg

SEQ ID NO: 27303 - RNA, 20 nt, Artificial Sequence
  HTT spacer sequence GTCN PAM
cuuaccaucccaaggacggc

SEQ ID NO: 27304 - RNA, 20 nt, Artificial Sequence
  HTT spacer sequence GTCN PAM
caaggcagaugggcccccgu

SEQ ID NO: 27305 - RNA, 20 nt, Artificial Sequence
  HTT spacer sequence GTCN PAM
acucuuggaaggaggcagcc

SEQ ID NO: 27306 - RNA, 20 nt, Artificial Sequence
  HTT spacer sequence GTCN PAM
gguucgggucaacucuugga

SEQ ID NO: 27307 - RNA, 20 nt, Artificial Sequence
  HTT spacer sequence GTCN PAM
cugaacccccuccaucugag

SEQ ID NO: 27308 - RNA, 20 nt, Artificial Sequence
  HTT spacer sequence GTCN PAM
gugccauucacaggucacug

SEQ ID NO: 27309 - RNA, 20 nt, Artificial Sequence
  HTT spacer sequence GTCN PAM
cugugauguggguuguggcg

SEQ ID NO: 27310 - RNA, 20 nt, Artificial Sequence
  HTT spacer sequence GTCN PAM
cguaucccugggcuuaugac

SEQ ID NO: 27311 - RNA, 20 nt, Artificial Sequence
  HTT spacer sequence GTCN PAM
uaagcccagggauacgggac

SEQ ID NO: 27312 - RNA, 20 nt, Artificial Sequence
  HTT spacer sequence GTCN PAM
ggccucagggcagagcaugg

SEQ ID NO: 27313 - RNA, 20 nt, Artificial Sequence
  HTT spacer sequence GTCN PAM
agccaggaagcucggggggc

SEQ ID NO: 27314 - RNA, 20 nt, Artificial Sequence
  HTT spacer sequence GTCN PAM
cagugacccuguguuucuag

SEQ ID NO: 27315 - RNA, 20 nt, Artificial Sequence
  HTT spacer sequence GTCN PAM
cugugacaaaacggccccca

SEQ ID NO: 27316 - RNA, 20 nt, Artificial Sequence
  HTT spacer sequence GTCN PAM
caaaucugggugcuauaguc

SEQ ID NO: 27317 - RNA, 20 nt, Artificial Sequence
  HTT spacer sequence GTCN PAM
cuuuuuagcguggugguugu

SEQ ID NO: 27318 - RNA, 20 nt, Artificial Sequence
  HTT spacer sequence GTCN PAM
uagucuuuuuuggcugcuac

SEQ ID NO: 27319 - RNA, 20 nt, Artificial Sequence
  HTT spacer sequence GTCN PAM
uuuuuggcugcuaccacaag

SEQ ID NO: 27320 - RNA, 20 nt, Artificial Sequence
  HTT spacer sequence GTCN PAM
aagguaacuugugguagcag

SEQ ID NO: 27321 - RNA, 20 nt, Artificial Sequence
  HTT spacer sequence GTCN PAM
aggugccagcagauuuggug

SEQ ID NO: 27322 - RNA, 20 nt, Artificial Sequence
  HTT spacer sequence GTCN PAM
ucacgguggaaggagugaac

SEQ ID NO: 27323 - RNA, 20 nt, Artificial Sequence
  HTT spacer sequence GTCN PAM
ugaugggagagcccuugugg

SEQ ID NO: 27324 - RNA, 20 nt, Artificial Sequence
  HTT spacer sequence GTCN PAM
guguaggaguuucaggaggg

SEQ ID NO: 27325 - RNA, 20 nt, Artificial Sequence
  HTT spacer sequence GTCN PAM
gaauguuucuaucccuccug

SEQ ID NO: 27326 - RNA, 20 nt, Artificial Sequence
  HTT spacer sequence GTCN PAM
aguguucauccucuugaguu

SEQ ID NO: 27327 - RNA, 20 nt, Artificial Sequence
  HTT spacer sequence GTCN PAM
cgacaucuggcgaagcauau

SEQ ID NO: 27328 - RNA, 20 nt, Artificial Sequence
  HTT spacer sequence GTCN PAM
ggacccacgggcaaugauuu

SEQ ID NO: 27329 - RNA, 20 nt, Artificial Sequence
  HTT spacer sequence GTCN PAM
gagcuggcaccucugguucc

SEQ ID NO: 27330 - RNA, 20 nt, Artificial Sequence
  HTT spacer sequence GTCN PAM
uguggcauuaccuaguaauc

SEQ ID NO: 27331 - RNA, 20 nt, Artificial Sequence
  HTT spacer sequence GTCN PAM
ggggcccuuggugagaaugg

SEQ ID NO: 27332 - RNA, 20 nt, Artificial Sequence
  HTT spacer sequence GTCN PAM
agagcacgggcuaggcaggc

SEQ ID NO: 27333 - RNA, 20 nt, Artificial Sequence
  HTT spacer sequence GTCN PAM
ggaacgacaaugcugucaug

SEQ ID NO: 27334 - RNA, 20 nt, Artificial Sequence
  HTT spacer sequence GTCN PAM
uuccugacacacaggagccc

SEQ ID NO: 27335 - RNA, 20 nt, Artificial Sequence
  HTT spacer sequence GTCN PAM
ugacggugaaugauuuuuuu

SEQ ID NO: 27336 - RNA, 20 nt, Artificial Sequence
  HTT spacer sequence GTCN PAM
ugacagcauugucguuccug

SEQ ID NO: 27337 - RNA, 20 nt, Artificial Sequence
  HTT spacer sequence GTCN PAM
ggugggggugcgggaggaag

SEQ ID NO: 27338 - RNA, 20 nt, Artificial Sequence
  HTT spacer sequence GTCN PAM
cccuuggccuugucaggugg

SEQ ID NO: 27339 - RNA, 20 nt, Artificial Sequence
  HTT spacer sequence GTCN PAM
gagguuagcuggcuugucug

SEQ ID NO: 27340 - RNA, 20 nt, Artificial Sequence
  HTT spacer sequence GTCN PAM
gggucacacaaaaugcagca

SEQ ID NO: 27341 - RNA, 20 nt, Artificial Sequence
  HTT spacer sequence GTCN PAM
cacaaaaugcagcagagguu

SEQ ID NO: 27342 - RNA, 20 nt, Artificial Sequence
  HTT spacer sequence GTCN PAM
gugaccuggagccugacucc

SEQ ID NO: 27343 - RNA, 20 nt, Artificial Sequence
  HTT spacer sequence GTCN PAM
cggacaugugcucaccucaa

SEQ ID NO: 27344 - RNA, 20 nt, Artificial Sequence
  HTT spacer sequence GTCN PAM
ggcuccaggucacggacaug

SEQ ID NO: 27345 - RNA, 20 nt, Artificial Sequence
  HTT spacer sequence GTCN PAM
ugacugcucuugccuagacu

SEQ ID NO: 27346 - RNA, 20 nt, Artificial Sequence
  HTT spacer sequence GTCN PAM
agacucgcagagagggaguc

SEQ ID NO: 27347 - RNA, 20 nt, Artificial Sequence
  HTT spacer sequence GTCN PAM
aggcaagagcagucaagacu

SEQ ID NO: 27348 - RNA, 20 nt, Artificial Sequence
  HTT spacer sequence GTCN PAM
uccccgagcccaaacgccag

SEQ ID NO: 27349 - RNA, 20 nt, Artificial Sequence
  HTT spacer sequence GTCN PAM
ucuucccuuguggguguccu

SEQ ID NO: 27350 - RNA, 20 nt, Artificial Sequence
  HTT spacer sequence GTCN PAM
uucagccuggugccaugcug

SEQ ID NO: 27351 - RNA, 20 nt, Artificial Sequence
  HTT spacer sequence GTCN PAM
ccagcauggcaccaggcuga

SEQ ID NO: 27352 - RNA, 20 nt, Artificial Sequence
  HTT spacer sequence GTCN PAM
agggaguggaaacaauugag

SEQ ID NO: 27353 - RNA, 20 nt, Artificial Sequence
  HTT spacer sequence GTCN PAM
aagcggcucuuggaaggggu

SEQ ID NO: 27354 - RNA, 20 nt, Artificial Sequence
  HTT spacer sequence GTCN PAM
uucuccuuugugggaaguuu

SEQ ID NO: 27355 - RNA, 20 nt, Artificial Sequence
  HTT spacer sequence GTCN PAM
uggacacucacucccagcuc

SEQ ID NO: 27356 - RNA, 20 nt, Artificial Sequence
  HTT spacer sequence GTCN PAM
augaccauccugccuuagga

SEQ ID NO: 27357 - RNA, 20 nt, Artificial Sequence
  HTT spacer sequence GTCN PAM
ugcuugguacccacguaucc

SEQ ID NO: 27358 - RNA, 20 nt, Artificial Sequence
  HTT spacer sequence GTCN PAM
uuuugagguauuugcccacc

SEQ ID NO: 27359 - RNA, 20 nt, Artificial Sequence
  HTT spacer sequence GTCN PAM
ugauguggggcuuucagaag

SEQ ID NO: 27360 - RNA, 20 nt, Artificial Sequence
  HTT spacer sequence GTCN PAM
cacuucugaaagccccacau

SEQ ID NO: 27361 - RNA, 20 nt, Artificial Sequence
  HTT spacer sequence GTCN PAM
uuagggaggggccguguggc

SEQ ID NO: 27362 - RNA, 20 nt, Artificial Sequence
  HTT spacer sequence GTCN PAM
cuuccuucuugggcccccac

SEQ ID NO: 27363 - RNA, 20 nt, Artificial Sequence
  HTT spacer sequence GTCN PAM
uuguuccugggauggcuggg

SEQ ID NO: 27364 - RNA, 20 nt, Artificial Sequence
  HTT spacer sequence GTCN PAM
uccggccauuuccccugcgg

SEQ ID NO: 27365 - RNA, 20 nt, Artificial Sequence
  HTT spacer sequence GTCN PAM
ggccauuuccccugcggaga

SEQ ID NO: 27366 - RNA, 20 nt, Artificial Sequence
  HTT spacer sequence GTCN PAM
ccauagucuugggcugaagg

SEQ ID NO: 27367 - RNA, 20 nt, Artificial Sequence
  HTT spacer sequence GTCN PAM
ugggcugaaggagggugaca

SEQ ID NO: 27368 - RNA, 20 nt, Artificial Sequence
  HTT spacer sequence GTCN PAM
cccuccuucagcccaagacu

SEQ ID NO: 27369 - RNA, 20 nt, Artificial Sequence
  HTT spacer sequence GTCN PAM
gcaaggaaugucacccuccu

SEQ ID NO: 27370 - RNA, 20 nt, Artificial Sequence
  HTT spacer sequence GTCN PAM
ccucacuguuaaagagcaga

SEQ ID NO: 27371 - RNA, 20 nt, Artificial Sequence
  HTT spacer sequence GTCN PAM
auauuuaacccugcuagguu

SEQ ID NO: 27372 - RNA, 20 nt, Artificial Sequence
  HTT spacer sequence GTCN PAM
acuucaaccaaaauggccuc

SEQ ID NO: 27373 - RNA, 20 nt, Artificial Sequence
  HTT spacer sequence GTCN PAM
uggggaucccugauaguggu

SEQ ID NO: 27374 - RNA, 20 nt, Artificial Sequence
  HTT spacer sequence GTCN PAM
uucuagaaaagccuggggua

SEQ ID NO: 27375 - RNA, 20 nt, Artificial Sequence
  HTT spacer sequence GTCN PAM
cgaggacaccaggcuugagc

SEQ ID NO: 27376 - RNA, 20 nt, Artificial Sequence
  HTT spacer sequence GTCN PAM
ucgggacaucgccccauggg

SEQ ID NO: 27377 - RNA, 20 nt, Artificial Sequence
  HTT spacer sequence GTCN PAM
ugcaggacgcacuuaacucc

SEQ ID NO: 27378 - RNA, 20 nt, Artificial Sequence
  HTT spacer sequence GTCN PAM
ugcacgaccccgcugggaga

SEQ ID NO: 27379 - RNA, 20 nt, Artificial Sequence
  HTT spacer sequence GTCN PAM
cggcucacugugcggggagu

SEQ ID NO: 27380 - RNA, 20 nt, Artificial Sequence
  HTT spacer sequence GTCN PAM
ucgccaggaaagcacacuag

SEQ ID NO: 27381 - RNA, 20 nt, Artificial Sequence
  HTT spacer sequence GTCN PAM
ccaggaaagcacacuagaga

SEQ ID NO: 27382 - RNA, 20 nt, Artificial Sequence
  HTT spacer sequence GTCN PAM
cuagugugcuuuccuggcga

SEQ ID NO: 27383 - RNA, 20 nt, Artificial Sequence
  HTT spacer sequence GTCN PAM
gggcacgaggcaggcagagg

SEQ ID NO: 27384 - RNA, 20 nt, Artificial Sequence
  HTT spacer sequence GTCN PAM
agagucugggcacgaggcag

SEQ ID NO: 27385 - RNA, 20 nt, Artificial Sequence
  HTT spacer sequence GTCN PAM
caacaccagccaggggccag

SEQ ID NO: 27386 - RNA, 20 nt, Artificial Sequence
  HTT spacer sequence GTCN PAM
ccggccugcuguguagucuc

SEQ ID NO: 27387 - RNA, 20 nt, Artificial Sequence
  HTT spacer sequence GTCN PAM
cuucugcacacaagcgugag

SEQ ID NO: 27388 - RNA, 20 nt, Artificial Sequence
  HTT spacer sequence GTCN PAM
caguggcuccuccccacagc

SEQ ID NO: 27389 - RNA, 20 nt, Artificial Sequence
  HTT spacer sequence GTCN PAM
gugugugccuaggacaaggc

SEQ ID NO: 27390 - RNA, 20 nt, Artificial Sequence
  HTT spacer sequence GTCN PAM
uaggcacacacagacaaaag

SEQ ID NO: 27391 - RNA, 20 nt, Artificial Sequence
  HTT spacer sequence GTCN PAM
gccgccugcuggagagcacg

SEQ ID NO: 27392 - RNA, 20 nt, Artificial Sequence
  HTT spacer sequence GTCN PAM
ucuaugugcuggagugcgac

SEQ ID NO: 27393 - RNA, 20 nt, Artificial Sequence
  HTT spacer sequence GTCN PAM
cacuccagcacauagaggac

SEQ ID NO: 27394 - RNA, 20 nt, Artificial Sequence
  HTT spacer sequence GTCN PAM
agcaggucgcacuccagcac

SEQ ID NO: 27395 - RNA, 20 nt, Artificial Sequence
  HTT spacer sequence GTCN PAM
uccagcaggucgcacuccag

SEQ ID NO: 27396 - RNA, 20 nt, Artificial Sequence
  HTT spacer sequence GTCN PAM
ucagcgacuaucuccucucc

SEQ ID NO: 27397 - RNA, 20 nt, Artificial Sequence
  HTT spacer sequence GTCN PAM
cugaugaccgggaugagcug

SEQ ID NO: 27398 - RNA, 20 nt, Artificial Sequence
  HTT spacer sequence GTCN PAM
cagaaugagcugugaaggaa

SEQ ID NO: 27399 - RNA, 20 nt, Artificial Sequence
  HTT spacer sequence GTCN PAM
gugagacgcaagagcacagg

SEQ ID NO: 27400 - RNA, 20 nt, Artificial Sequence
  HTT spacer sequence GTCN PAM
cacugaccucagccauggca

SEQ ID NO: 27401 - RNA, 20 nt, Artificial Sequence
  HTT spacer sequence GTCN PAM
uagaggcuuccucgggcacc

SEQ ID NO: 27402 - RNA, 20 nt, Artificial Sequence
  HTT spacer sequence GTCN PAM
cauguggcgcuuagcacacu

SEQ ID NO: 27403 - RNA, 20 nt, Artificial Sequence
  HTT spacer sequence GTCN PAM
ggaaugggcacgugggagag

SEQ ID NO: 27404 - RNA, 20 nt, Artificial Sequence
  HTT spacer sequence GTCN PAM
gaaucacaguggaaacaaga

SEQ ID NO: 27405 - RNA, 20 nt, Artificial Sequence
  HTT spacer sequence GTCN PAM
agcagcuuuaagauaaggug

SEQ ID NO: 27406 - RNA, 20 nt, Artificial Sequence
  HTT spacer sequence GTCN PAM
uugacaaagcacggcuggug

SEQ ID NO: 27407 - RNA, 20 nt, Artificial Sequence
  HTT spacer sequence GTCN PAM
aggacacguguguacagaac

SEQ ID NO: 27408 - RNA, 20 nt, Artificial Sequence
  HTT spacer sequence GTCN PAM
agcucuucacagcgaugucu

SEQ ID NO: 27409 - RNA, 20 nt, Artificial Sequence
  HTT spacer sequence GTCN PAM
uacaagcgcagagggcucug

SEQ ID NO: 27410 - RNA, 20 nt, Artificial Sequence
  HTT spacer sequence GTCN PAM
cagagcccucugcgcuugua

SEQ ID NO: 27411 - RNA, 20 nt, Artificial Sequence
  HTT spacer sequence GTCN PAM
caccgccacucuuccaaagu

SEQ ID NO: 27412 - RNA, 20 nt, Artificial Sequence
  HTT spacer sequence GTCN PAM
cagaggcuuuagcagagaug

SEQ ID NO: 27413 - RNA, 20 nt, Artificial Sequence
  HTT spacer sequence GTCN PAM
uaggcuucugcacacgggag

SEQ ID NO: 27414 - RNA, 20 nt, Artificial Sequence
  HTT spacer sequence GTCN PAM
uuagagggaggguggaauuu

SEQ ID NO: 27415 - RNA, 20 nt, Artificial Sequence
  HTT spacer sequence GTCN PAM
gggaggaauggccagugauc

SEQ ID NO: 27416 - RNA, 20 nt, Artificial Sequence
  HTT spacer sequence GTCN PAM
aaggggaucacuggccauuc

SEQ ID NO: 27417 - RNA, 20 nt, Artificial Sequence
  HTT spacer sequence GTCN PAM
aaguugaguggaagaccugg

SEQ ID NO: 27418 - RNA, 20 nt, Artificial Sequence
  HTT spacer sequence GTCN PAM
uccacucaacuuugaccuag

SEQ ID NO: 27419 - RNA, 20 nt, Artificial Sequence
  HTT spacer sequence GTCN PAM
cccuccaggucuuccacuca

SEQ ID NO: 27420 - RNA, 20 nt, Artificial Sequence
  HTT spacer sequence GTCN PAM
cuguaggcacaguucagaca

SEQ ID NO: 27421 - RNA, 20 nt, Artificial Sequence
  HTT spacer sequence GTCN PAM
gaacugugccuacagagacc

SEQ ID NO: 27422 - RNA, 20 nt, Artificial Sequence
  HTT spacer sequence GTCN PAM
ggcaggauuugggacaugcu

SEQ ID NO: 27423 - RNA, 20 nt, Artificial Sequence
  HTT spacer sequence GTCN PAM
caaauccugccagacggcca

SEQ ID NO: 27424 - RNA, 20 nt, Artificial Sequence
  HTT spacer sequence GTCN PAM
cugcuccagcaugucccaaa

SEQ ID NO: 27425 - RNA, 20 nt, Artificial Sequence
  HTT spacer sequence GTCN PAM
caagcccguggggaggcccu

SEQ ID NO: 27426 - RNA, 20 nt, Artificial Sequence
  HTT spacer sequence GTCN PAM
uccuugcugggcagugggug

SEQ ID NO: 27427 - RNA, 20 nt, Artificial Sequence
  HTT spacer sequence GTCN PAM
ugcuagcacagcacccacug

SEQ ID NO: 27428 - RNA, 20 nt, Artificial Sequence
  HTT spacer sequence GTCN PAM
gccuguccugcuagcacagc

SEQ ID NO: 27429 - RNA, 20 nt, Artificial Sequence
  HTT spacer sequence GTCN PAM
cugcaucccuggagccuggc

SEQ ID NO: 27430 - RNA, 20 nt, Artificial Sequence
  HTT spacer sequence GTCN PAM
cacggggcacaggccugcaa

SEQ ID NO: 27431 - RNA, 20 nt, Artificial Sequence
  HTT spacer sequence GTCN PAM
cugcaccaacauaugugccu

SEQ ID NO: 27432 - RNA, 20 nt, Artificial Sequence
  HTT spacer sequence GTCN PAM
ggggccuguucuggggcugc

SEQ ID NO: 27433 - RNA, 20 nt, Artificial Sequence
  HTT spacer sequence GTCN PAM
uccaugcccacagcaagagc

SEQ ID NO: 27434 - RNA, 20 nt, Artificial Sequence
  HTT spacer sequence GTCN PAM
aggaguugcguuugggaugc

SEQ ID NO: 27435 - RNA, 20 nt, Artificial Sequence
  HTT spacer sequence GTCN PAM
gccccacgcaccauuucuac

SEQ ID NO: 27436 - RNA, 20 nt, Artificial Sequence
  HTT spacer sequence GTCN PAM
cgugccuccgagguggaggu

SEQ ID NO: 27437 - RNA, 20 nt, Artificial Sequence
  HTT spacer sequence GTCN PAM
caccuccaccucggaggcac

SEQ ID NO: 27438 - RNA, 20 nt, Artificial Sequence
  HTT spacer sequence GTCN PAM
ccacguggucccaccuccac

SEQ ID NO: 27439 - RNA, 20 nt, Artificial Sequence
  HTT spacer sequence GTCN PAM
cuggcuaccagguccucacu

SEQ ID NO: 27440 - RNA, 20 nt, Artificial Sequence
  HTT spacer sequence GTCN PAM
ucacugugccauggggaagg

SEQ ID NO: 27441 - RNA, 20 nt, Artificial Sequence
  HTT spacer sequence GTCN PAM
ggggaucacagaaggcagca

SEQ ID NO: 27442 - RNA, 20 nt, Artificial Sequence
  HTT spacer sequence GTCN PAM
ugauggcaugugccaugaag

SEQ ID NO: 27443 - RNA, 20 nt, Artificial Sequence
  HTT spacer sequence GTCN PAM
ccucuacuuccugagugccc

SEQ ID NO: 27444 - RNA, 20 nt, Artificial Sequence
  HTT spacer sequence GTCN PAM
cucaacgaggcccuagauuc

SEQ ID NO: 27445 - RNA, 20 nt, Artificial Sequence
  HTT spacer sequence GTCN PAM
accuccccaacgcccugccc

SEQ ID NO: 27446 - RNA, 20 nt, Artificial Sequence
  HTT spacer sequence GTCN PAM
agcagaggcugaagggucag

SEQ ID NO: 27447 - RNA, 20 nt, Artificial Sequence
  HTT spacer sequence GTCN PAM
ggccagguugcaggggccug

SEQ ID NO: 27448 - RNA, 20 nt, Artificial Sequence
  HTT spacer sequence GTCN PAM
ggccccacgcgggaguguag

SEQ ID NO: 27449 - RNA, 20 nt, Artificial Sequence
  HTT spacer sequence GTCN PAM
cccguuuucagcugcgugaa

SEQ ID NO: 27450 - RNA, 20 nt, Artificial Sequence
  HTT spacer sequence GTCN PAM
ugugugccacugcguuuuac

SEQ ID NO: 27451 - RNA, 20 nt, Artificial Sequence
  HTT spacer sequence GTCN PAM
agaggauaguucucaaugag

SEQ ID NO: 27452 - RNA, 20 nt, Artificial Sequence
  HTT spacer sequence GTCN PAM
uccucugcacacggggagug

SEQ ID NO: 27453 - RNA, 20 nt, Artificial Sequence
  HTT spacer sequence GTCN PAM
aaacuggcccacugguauga

SEQ ID NO: 27454 - RNA, 20 nt, Artificial Sequence
  HTT spacer sequence GTCN PAM
ggaggaggcaugaacaccug

SEQ ID NO: 27455 - RNA, 20 nt, Artificial Sequence
  HTT spacer sequence GTCN PAM
cagguguucaugccuccucc

SEQ ID NO: 27456 - RNA, 20 nt, Artificial Sequence
  HTT spacer sequence GTCN PAM
aagaaucgcugcacagucuc

SEQ ID NO: 27457 - RNA, 20 nt, Artificial Sequence
  HTT spacer sequence GTCN PAM
ggaagugaggaguccacccc

SEQ ID NO: 27458 - RNA, 20 nt, Artificial Sequence
  HTT spacer sequence GTCN PAM
acccccuccaucauuuacca

SEQ ID NO: 27459 - RNA, 20 nt, Artificial Sequence
  HTT spacer sequence GTCN PAM
agcugaguguggacagagug

SEQ ID NO: 27460 - RNA, 20 nt, Artificial Sequence
  HTT spacer sequence GTCN PAM
acacucagcuugaccagcga

SEQ ID NO: 27461 - RNA, 20 nt, Artificial Sequence
  HTT spacer sequence GTCN PAM
uguucaagggaggcaggagc

SEQ ID NO: 27462 - RNA, 20 nt, Artificial Sequence
  HTT spacer sequence GTCN PAM
cuugagugagcaugcuccug

SEQ ID NO: 27463 - RNA, 20 nt, Artificial Sequence
  HTT spacer sequence GTCN PAM
aggucccuugagugagcaug

SEQ ID NO: 27464 - RNA, 20 nt, Artificial Sequence
  HTT spacer sequence GTCN PAM
ggguugaccgucccuguggu

SEQ ID NO: 27465 - RNA, 20 nt, Artificial Sequence
  HTT spacer sequence GTCN PAM
acccugaccagguacuccag

SEQ ID NO: 27466 - RNA, 20 nt, Artificial Sequence
  HTT spacer sequence GTCN PAM
cuguggucacucaucccaug

SEQ ID NO: 27467 - RNA, 20 nt, Artificial Sequence
  HTT spacer sequence GTCN PAM
cucaucccauguggcugagc

SEQ ID NO: 27468 - RNA, 20 nt, Artificial Sequence
  HTT spacer sequence GTCN PAM
ugggcaagcaaggggcugau

SEQ ID NO: 27469 - RNA, 20 nt, Artificial Sequence
  HTT spacer sequence GTCN PAM
cuggagaucugaaagcaggu

SEQ ID NO: 27470 - RNA, 20 nt, Artificial Sequence
  HTT spacer sequence GTCN PAM
agugagucccuggagaucug

SEQ ID NO: 27471 - RNA, 20 nt, Artificial Sequence
  HTT spacer sequence GTCN PAM
acagagccuauuggguugua

SEQ ID NO: 27472 - RNA, 20 nt, Artificial Sequence
  HTT spacer sequence GTCN PAM
guccggguagaacuucagac

SEQ ID NO: 27473 - RNA, 20 nt, Artificial Sequence
  HTT spacer sequence GTCN PAM
ggguagaacuucagacccua

SEQ ID NO: 27474 - RNA, 20 nt, Artificial Sequence
  HTT spacer sequence GTCN PAM
gaaguucuacccggacugac

SEQ ID NO: 27475 - RNA, 20 nt, Artificial Sequence
  HTT spacer sequence GTCN PAM
ggggcugcaggauuaggguc

SEQ ID NO: 27476 - RNA, 20 nt, Artificial Sequence
  HTT spacer sequence GTCN PAM
gugauuguugcuauggagcg

SEQ ID NO: 27477 - RNA, 20 nt, Artificial Sequence
  HTT spacer sequence GTCN PAM
gcugauccccuggcgcuguu

SEQ ID NO: 27478 - RNA, 20 nt, Artificial Sequence
  HTT spacer sequence GTCN PAM
ugccagugauuccccaccac

SEQ ID NO: 27479 - RNA, 20 nt, Artificial Sequence
  HTT spacer sequence GTCN PAM
ggcugugguggggaaucacu

SEQ ID NO: 27480 - RNA, 20 nt, Artificial Sequence
  HTT spacer sequence GTCN PAM
uuggaccccagcacucaggu

SEQ ID NO: 27481 - RNA, 20 nt, Artificial Sequence
  HTT spacer sequence GTCN PAM
aaggaccaccagcucgccag

SEQ ID NO: 27482 - RNA, 20 nt, Artificial Sequence
  HTT spacer sequence GTCN PAM
acgcuacaccugagugcugg

SEQ ID NO: 27483 - RNA, 20 nt, Artificial Sequence
  HTT spacer sequence GTCN PAM
cagugccugcccaucucucc

SEQ ID NO: 27484 - RNA, 20 nt, Artificial Sequence
  HTT spacer sequence GTCN PAM
cugagcccucaggagagaug

SEQ ID NO: 27485 - RNA, 20 nt, Artificial Sequence
  HTT spacer sequence GTCN PAM
uuccugcccccugccacacc

SEQ ID NO: 27486 - RNA, 20 nt, Artificial Sequence
  HTT spacer sequence GTCN PAM
caaagaugcauguguggguu

SEQ ID NO: 27487 - RNA, 20 nt, Artificial Sequence
  HTT spacer sequence GTCN PAM
guggcuucugccccccacca

SEQ ID NO: 27488 - RNA, 20 nt, Artificial Sequence
  HTT spacer sequence GTCN PAM
uugagaaaaagcccuaccaa

SEQ ID NO: 27489 - RNA, 20 nt, Artificial Sequence
  HTT spacer sequence GTCN PAM
uggcgacaugguggaucugg

SEQ ID NO: 27490 - RNA, 20 nt, Artificial Sequence
  HTT spacer sequence GTCN PAM
ccaggacugaggccugagag

SEQ ID NO: 27491 - RNA, 20 nt, Artificial Sequence
  HTT spacer sequence GTCN PAM
accugaguaugcucuugaga

SEQ ID NO: 27492 - RNA, 20 nt, Artificial Sequence
  HTT spacer sequence GTCN PAM
aacaguggagcaagguccac

SEQ ID NO: 27493 - RNA, 20 nt, Artificial Sequence
  HTT spacer sequence GTCN PAM
guuuucauguugauuuuuuu

SEQ ID NO: 27494 - RNA, 20 nt, Artificial Sequence
  HTT spacer sequence GTCN PAM
cccaggcuggagugcaaugg

SEQ ID NO: 27495 - RNA, 20 nt, Artificial Sequence
  HTT spacer sequence GTCN PAM
cuacuaaaaacacaaaaauu

SEQ ID NO: 27496 - RNA, 20 nt, Artificial Sequence
  HTT spacer sequence GTCN PAM
cgaacuccugaacucaagug

SEQ ID NO: 27497 - RNA, 20 nt, Artificial Sequence
  HTT spacer sequence GTCN PAM
auuuuuaaaugcaccucugc

SEQ ID NO: 27498 - RNA, 20 nt, Artificial Sequence
  HTT spacer sequence GTCN PAM
ccauaugcucacugagcacc

SEQ ID NO: 27499 - RNA, 20 nt, Artificial Sequence
  HTT spacer sequence GTCN PAM
caguggugcucagugagcau

SEQ ID NO: 27500 - RNA, 20 nt, Artificial Sequence
  HTT spacer sequence GTCN PAM
gccagucgcaguggugcuca

SEQ ID NO: 27501 - RNA, 20 nt, Artificial Sequence
  HTT spacer sequence GTCN PAM
uggcgccucccugugcccgu

SEQ ID NO: 27502 - RNA, 20 nt, Artificial Sequence
  HTT spacer sequence GTCN PAM
uggccuucaaggggcuugug

SEQ ID NO: 27503 - RNA, 20 nt, Artificial Sequence
  HTT spacer sequence GTCN PAM
agugggcccaaugcuaggug

SEQ ID NO: 27504 - RNA, 20 nt, Artificial Sequence
  HTT spacer sequence GTCN PAM
agcggaaggcgugcaccaca

SEQ ID NO: 27505 - RNA, 20 nt, Artificial Sequence
  HTT spacer sequence GTCN PAM
ggagagcggucaagcggaag

SEQ ID NO: 27506 - RNA, 20 nt, Artificial Sequence
  HTT spacer sequence GTCN PAM
gcugcgaggugccucccugu

SEQ ID NO: 27507 - RNA, 20 nt, Artificial Sequence
  HTT spacer sequence GTCN PAM
ucagagcggcugccaugcca

SEQ ID NO: 27508 - RNA, 20 nt, Artificial Sequence
  HTT spacer sequence GTCN PAM
gcgggcggguagagccagga

SEQ ID NO: 27509 - RNA, 20 nt, Artificial Sequence
  HTT spacer sequence GTCN PAM
caguuacacacggcuggcau

SEQ ID NO: 27510 - RNA, 20 nt, Artificial Sequence
  HTT spacer sequence GTCN PAM
caucagugcacacaugccag

SEQ ID NO: 27511 - RNA, 20 nt, Artificial Sequence
  HTT spacer sequence GTCN PAM
ugguugacaacagugccacg

SEQ ID NO: 27512 - RNA, 20 nt, Artificial Sequence
  HTT spacer sequence GTCN PAM
accaggacuuuuuucuuguu

SEQ ID NO: 27513 - RNA, 20 nt, Artificial Sequence
  HTT spacer sequence GTCN PAM
cuacagggcgugggagccca

SEQ ID NO: 27514 - RNA, 20 nt, Artificial Sequence
  HTT spacer sequence GTCN PAM
cuacagggugugggagccca

SEQ ID NO: 27515 - RNA, 20 nt, Artificial Sequence
  HTT spacer sequence GTCN PAM
agcucguggaggcaggcugc

SEQ ID NO: 27516 - RNA, 20 nt, Artificial Sequence
  HTT spacer sequence GTCN PAM
caaaauucguacuccaguug

SEQ ID NO: 27517 - RNA, 20 nt, Artificial Sequence
  HTT spacer sequence GTCN PAM
gagccuaagcaacuggagua

SEQ ID NO: 27518 - RNA, 20 nt, Artificial Sequence
  HTT spacer sequence GTCN PAM
cucacggccgagggucccuc

SEQ ID NO: 27519 - RNA, 20 nt, Artificial Sequence
  HTT spacer sequence GTCN PAM
cucccagcccugauuucaca

SEQ ID NO: 27520 - RNA, 20 nt, Artificial Sequence
  HTT spacer sequence GTCN PAM
cugaccugcgucccuccucc

SEQ ID NO: 27521 - RNA, 20 nt, Artificial Sequence
  HTT spacer sequence GTCN PAM
gagacuggcaccagcuccca

SEQ ID NO: 27522 - RNA, 20 nt, Artificial Sequence
  HTT spacer sequence GTCN PAM
cuccucccaggaucaggaaa

SEQ ID NO: 27523 - RNA, 20 nt, Artificial Sequence
  HTT spacer sequence GTCN PAM
agaaacuggggcaggauccu

SEQ ID NO: 27524 - RNA, 20 nt, Artificial Sequence
  HTT spacer sequence GTCN PAM
ucuagaaacuggggcaggau

SEQ ID NO: 27525 - RNA, 20 nt, Artificial Sequence
  HTT spacer sequence GTCN PAM
uggggugggaagaagucguc

SEQ ID NO: 27526 - RNA, 20 nt, Artificial Sequence
  HTT spacer sequence GTCN PAM
ucggagaguuucuguccaac

SEQ ID NO: 27527 - RNA, 20 nt, Artificial Sequence
  HTT spacer sequence GTCN PAM
aaccagcagccauaccccca

SEQ ID NO: 27528 - RNA, 20 nt, Artificial Sequence
  HTT spacer sequence GTCN PAM
gaggcaacuccaccuccagg

SEQ ID NO: 27529 - RNA, 20 nt, Artificial Sequence
  HTT spacer sequence GTCN PAM
ccccagcccugacacucagg

SEQ ID NO: 27530 - RNA, 20 nt, Artificial Sequence
  HTT spacer sequence GTCN PAM
gggcuggggggacgggaagc

SEQ ID NO: 27531 - RNA, 20 nt, Artificial Sequence
  HTT spacer sequence GTCN PAM
gaaacaccugcaaggagcaa

SEQ ID NO: 27532 - RNA, 20 nt, Artificial Sequence
  HTT spacer sequence GTCN PAM
uccaugguccgggacugggu

SEQ ID NO: 27533 - RNA, 20 nt, Artificial Sequence
  HTT spacer sequence GTCN PAM
augguccgggacugggucau

SEQ ID NO: 27534 - RNA, 20 nt, Artificial Sequence
  HTT spacer sequence GTCN PAM
gggacugggucaugcugucc

SEQ ID NO: 27535 - RNA, 20 nt, Artificial Sequence
  HTT spacer sequence GTCN PAM
cggaccauggacgacugccc

SEQ ID NO: 27536 - RNA, 20 nt, Artificial Sequence
  HTT spacer sequence GTCN PAM
ugcugucccucuccaacuuc

SEQ ID NO: 27537 - RNA, 20 nt, Artificial Sequence
  HTT spacer sequence GTCN PAM
cucuccaacuucacgcagag

SEQ ID NO: 27538 - RNA, 20 nt, Artificial Sequence
  HTT spacer sequence GTCN PAM
ccauggccacguggagccuc

SEQ ID NO: 27539 - RNA, 20 nt, Artificial Sequence
  HTT spacer sequence GTCN PAM
gcgcguccaccagcccgugg

SEQ ID NO: 27540 - RNA, 20 nt, Artificial Sequence
  HTT spacer sequence GTCN PAM
accagcccgugggucgcggc

SEQ ID NO: 27541 - RNA, 20 nt, Artificial Sequence
  HTT spacer sequence GTCN PAM
cggcgauguauccucucugg

SEQ ID NO: 27542 - RNA, 20 nt, Artificial Sequence
  HTT spacer sequence GTCN PAM
cuggugcuggccccguuucc

SEQ ID NO: 27543 - RNA, 20 nt, Artificial Sequence
  HTT spacer sequence GTCN PAM
acaccgaggcucauguuuca

SEQ ID NO: 27544 - RNA, 20 nt, Artificial Sequence
  HTT spacer sequence GTCN PAM
cccuggcaucugugggguuu

SEQ ID NO: 27545 - RNA, 20 nt, Artificial Sequence
  HTT spacer sequence GTCN PAM
gcauuuuacuucccuggggc

SEQ ID NO: 27546 - RNA, 20 nt, Artificial Sequence
  HTT spacer sequence GTCN PAM
agacauuugcugaccagggc

SEQ ID NO: 27547 - RNA, 20 nt, Artificial Sequence
  HTT spacer sequence GTCN PAM
ggacgugcuccuuucuguac

SEQ ID NO: 27548 - RNA, 20 nt, Artificial Sequence
  HTT spacer sequence GTCN PAM
gcaaaugucuggacgugcuc

SEQ ID NO: 27549 - RNA, 20 nt, Artificial Sequence
  HTT spacer sequence GTCN PAM
cagcugaggggccuuucugu

SEQ ID NO: 27550 - RNA, 20 nt, Artificial Sequence
  HTT spacer sequence GTCN PAM
cugcagacgucccgcccacu

SEQ ID NO: 27551 - RNA, 20 nt, Artificial Sequence
  HTT spacer sequence GTCN PAM
gcagagaccaccgcccaccc

SEQ ID NO: 27552 - RNA, 20 nt, Artificial Sequence
  HTT spacer sequence GTCN PAM
cgcccacucgcgggcucugu

SEQ ID NO: 27553 - RNA, 20 nt, Artificial Sequence
  HTT spacer sequence GTCN PAM
ggagaagcccagccacacag

SEQ ID NO: 27554 - RNA, 20 nt, Artificial Sequence
  HTT spacer sequence GTCN PAM
uugugccucgaucgcccucu

SEQ ID NO: 27555 - RNA, 20 nt, Artificial Sequence
  HTT spacer sequence GTCN PAM
uggggaagggcuguggaaag

SEQ ID NO: 27556 - RNA, 20 nt, Artificial Sequence
  HTT spacer sequence GTCN PAM
gucuuggggaagggcugugg

SEQ ID NO: 27557 - RNA, 20 nt, Artificial Sequence
  HTT spacer sequence GTCN PAM
uggugcugacagcacagccu

SEQ ID NO: 27558 - RNA, 20 nt, Artificial Sequence
  HTT spacer sequence GTCN PAM
gcaccaggacaacugugcug

SEQ ID NO: 27559 - RNA, 20 nt, Artificial Sequence
  HTT spacer sequence GTCN PAM
agggagccuggagagcgagc

SEQ ID NO: 27560 - RNA, 20 nt, Artificial Sequence
  HTT spacer sequence GTCN PAM
acaaagggguccagggagcc

SEQ ID NO: 27561 - RNA, 20 nt, Artificial Sequence
  HTT spacer sequence GTCN PAM
ucaccugggaguuccucucc

SEQ ID NO: 27562 - RNA, 20 nt, Artificial Sequence
  HTT spacer sequence GTCN PAM
ucagcaggaugggcaagcug

SEQ ID NO: 27563 - RNA, 20 nt, Artificial Sequence
  HTT spacer sequence GTCN PAM
accugcuccagcuugcccau

SEQ ID NO: 27564 - RNA, 20 nt, Artificial Sequence
  HTT spacer sequence GTCN PAM
ccacagacuucuacagacac

SEQ ID NO: 27565 - RNA, 20 nt, Artificial Sequence
  HTT spacer sequence GTCN PAM
guggcgaccaggcagaaaag

SEQ ID NO: 27566 - RNA, 20 nt, Artificial Sequence
  HTT spacer sequence GTCN PAM
guagaagucuguggcgacca

SEQ ID NO: 27567 - RNA, 20 nt, Artificial Sequence
  HTT spacer sequence GTCN PAM
agcuccuccucuaucuggug

SEQ ID NO: 27568 - RNA, 20 nt, Artificial Sequence
  HTT spacer sequence GTCN PAM
gugcuugaggugguugcagc

SEQ ID NO: 27569 - RNA, 20 nt, Artificial Sequence
  HTT spacer sequence GTCN PAM
gcagccggugauaugggcuu

SEQ ID NO: 27570 - RNA, 20 nt, Artificial Sequence
  HTT spacer sequence GTCN PAM
acaaggucaccaccugcuga

SEQ ID NO: 27571 - RNA, 20 nt, Artificial Sequence
  HTT spacer sequence GTCN PAM
ccaccugcugagcgccaugg

SEQ ID NO: 27572 - RNA, 20 nt, Artificial Sequence
  HTT spacer sequence GTCN PAM
cucccaccauggcgcucagc

SEQ ID NO: 27573 - RNA, 20 nt, Artificial Sequence
  HTT spacer sequence GTCN PAM
gcgcccuugugcccugccuc

SEQ ID NO: 27574 - RNA, 20 nt, Artificial Sequence
  HTT spacer sequence GTCN PAM
cuaugggcuuccgcacaugc

SEQ ID NO: 27575 - RNA, 20 nt, Artificial Sequence
  HTT spacer sequence GTCN PAM
cugccauguggcagaagugc

SEQ ID NO: 27576 - RNA, 20 nt, Artificial Sequence
  HTT spacer sequence GTCN PAM
gcaguccugguggggcugag

SEQ ID NO: 27577 - RNA, 20 nt, Artificial Sequence
  HTT spacer sequence GTCN PAM
ugguggggcugagccugagg

SEQ ID NO: 27578 - RNA, 20 nt, Artificial Sequence
  HTT spacer sequence GTCN PAM
cccacauggggugcagcaca

SEQ ID NO: 27579 - RNA, 20 nt, Artificial Sequence
  HTT spacer sequence GTCN PAM
uuucuccugauagucaccug

SEQ ID NO: 27580 - RNA, 20 nt, Artificial Sequence
  HTT spacer sequence GTCN PAM
ccugcugguuguugccaggu

SEQ ID NO: 27581 - RNA, 20 nt, Artificial Sequence
  HTT spacer sequence GTCN PAM
ucccuccugcaggcuggcug

SEQ ID NO: 27582 - RNA, 20 nt, Artificial Sequence
  HTT spacer sequence GTCN PAM
ugcaguagaaggugccguga

SEQ ID NO: 27583 - RNA, 20 nt, Artificial Sequence
  HTT spacer sequence GTCN PAM
cccugguggggugugcaugc

SEQ ID NO: 27584 - RNA, 20 nt, Artificial Sequence
  HTT spacer sequence GTCN PAM
ggaugcacagaugccauggc

SEQ ID NO: 27585 - RNA, 20 nt, Artificial Sequence
  HTT spacer sequence GTCN PAM
agcacccccagccacuggcc

SEQ ID NO: 27586 - RNA, 20 nt, Artificial Sequence
  HTT spacer sequence GTCN PAM
caugcagcacaggccuugcg

SEQ ID NO: 27587 - RNA, 20 nt, Artificial Sequence
  HTT spacer sequence GTCN PAM
ggggugguggacagggcccc

SEQ ID NO: 27588 - RNA, 20 nt, Artificial Sequence
  HTT spacer sequence GTCN PAM
accaccccggacgcugucgc

SEQ ID NO: 27589 - RNA, 20 nt, Artificial Sequence
  HTT spacer sequence GTCN PAM
gcgggugcucaggagggcua

SEQ ID NO: 27590 - RNA, 20 nt, Artificial Sequence
  HTT spacer sequence GTCN PAM
ccuugugaaugcauaaacag

SEQ ID NO: 27591 - RNA, 20 nt, Artificial Sequence
  HTT spacer sequence GTCN PAM
ugcuguggccaccugcccac

SEQ ID NO: 27592 - RNA, 20 nt, Artificial Sequence
  HTT spacer sequence GTCN PAM
ucaguccugcuguggccacc

SEQ ID NO: 27593 - RNA, 20 nt, Artificial Sequence
  HTT spacer sequence GTCN PAM
gugcccgaggaggaggggcu

SEQ ID NO: 27594 - RNA, 20 nt, Artificial Sequence
  HTT spacer sequence GTCN PAM
ucugugcccgaggaggaggg

SEQ ID NO: 27595 - RNA, 20 nt, Artificial Sequence
  HTT spacer sequence GTCN PAM
uucuccacccaccagucagg

SEQ ID NO: 27596 - RNA, 20 nt, Artificial Sequence
  HTT spacer sequence GTCN PAM
gggacagcagccucccuguc

SEQ ID NO: 27597 - RNA, 20 nt, Artificial Sequence
  HTT spacer sequence GTCN PAM
cugacugguggguggagaac

SEQ ID NO: 27598 - RNA, 20 nt, Artificial Sequence
  HTT spacer sequence GTCN PAM
cucagcugagaaggccagcc

SEQ ID NO: 27599 - RNA, 20 nt, Artificial Sequence
  HTT spacer sequence GTCN PAM
agagacaugggccucccacu

SEQ ID NO: 27600 - RNA, 20 nt, Artificial Sequence
  HTT spacer sequence GTCN PAM
cuggacacaguggaggcugc

SEQ ID NO: 27601 - RNA, 20 nt, Artificial Sequence
  HTT spacer sequence GTCN PAM
gccuaggagcuggcuggcag

SEQ ID NO: 27602 - RNA, 20 nt, Artificial Sequence
  HTT spacer sequence GTCN PAM
caacaccugccagccagcuc

SEQ ID NO: 27603 - RNA, 20 nt, Artificial Sequence
  HTT spacer sequence GTCN PAM
cugagcuguguuuugucuga

SEQ ID NO: 27604 - RNA, 20 nt, Artificial Sequence
  HTT spacer sequence GTCN PAM
gagccucucucggucaacag

SEQ ID NO: 27605 - RNA, 20 nt, Artificial Sequence
  HTT spacer sequence GTCN PAM
acagcaaagcuuggugucuu

SEQ ID NO: 27606 - RNA, 20 nt, Artificial Sequence
  HTT spacer sequence GTCN PAM
uggcacuguuagugacagag

SEQ ID NO: 27607 - RNA, 20 nt, Artificial Sequence
  HTT spacer sequence GTCN PAM
cuaacagugccaagacacca

SEQ ID NO: 27608 - RNA, 20 nt, Artificial Sequence
  HTT spacer sequence GTCN PAM
gcuggaacgggggcagaagg

SEQ ID NO: 27609 - RNA, 20 nt, Artificial Sequence
  HTT spacer sequence GTCN PAM
ccgugcaagaugucagcugg

SEQ ID NO: 27610 - RNA, 20 nt, Artificial Sequence
  HTT spacer sequence GTCN PAM
ggagagugcagaucugugcu

SEQ ID NO: 27611 - RNA, 20 nt, Artificial Sequence
  HTT spacer sequence GTCN PAM
ccgaugagcacagaucugca

SEQ ID NO: 27612 - RNA, 20 nt, Artificial Sequence
  HTT spacer sequence GTCN PAM
gagccgccacuccuaucccc

SEQ ID NO: 27613 - RNA, 20 nt, Artificial Sequence
  HTT spacer sequence GTCN PAM
cuggaccagccuccuguuug

SEQ ID NO: 27614 - RNA, 20 nt, Artificial Sequence
  HTT spacer sequence GTCN PAM
agggaccuggccuggggaua

SEQ ID NO: 27615 - RNA, 20 nt, Artificial Sequence
  HTT spacer sequence GTCN PAM
uuaaaauggaaguggauucu

SEQ ID NO: 27616 - RNA, 20 nt, Artificial Sequence
  HTT spacer sequence GTCN PAM
gcaagcagagcucccaaauc

SEQ ID NO: 27617 - RNA, 20 nt, Artificial Sequence
  HTT spacer sequence GTCN PAM
cacagccagucggcaagcag

SEQ ID NO: 27618 - RNA, 20 nt, Artificial Sequence
  HTT spacer sequence GTCN PAM
ccaaccuugccuggcucgcc

SEQ ID NO: 27619 - RNA, 20 nt, Artificial Sequence
  HTT spacer sequence GTCN PAM
uguggcuugguuuggucaug

SEQ ID NO: 27620 - RNA, 20 nt, Artificial Sequence
  HTT spacer sequence GTCN PAM
ugcccgucgauguuuugggu

SEQ ID NO: 27621 - RNA, 20 nt, Artificial Sequence
  HTT spacer sequence GTCN PAM
auguuuuggguauugaaugu

SEQ ID NO: 27622 - RNA, 20 nt, Artificial Sequence
  HTT spacer sequence GTCN PAM
caaggcagcaccugcacaga

SEQ ID NO: 27623 - RNA, 20 nt, Artificial Sequence
  HTT spacer sequence GTCN PAM
cucuccuauguggcagcugg

SEQ ID NO: 27624 - RNA, 20 nt, Artificial Sequence
  HTT spacer sequence GTCN PAM
acaucucagcugcuccccag

SEQ ID NO: 27625 - RNA, 20 nt, Artificial Sequence
  HTT spacer sequence GTCN PAM
uggcugggggaggccucugu

SEQ ID NO: 27626 - RNA, 20 nt, Artificial Sequence
  HTT spacer sequence GTCN PAM
ucguggcggggcagcaggag

SEQ ID NO: 27627 - RNA, 20 nt, Artificial Sequence
  HTT spacer sequence GTCN PAM
gauguuugaggaggcccuua

SEQ ID NO: 27628 - RNA, 20 nt, Artificial Sequence
  HTT spacer sequence GTCN PAM
gcagcucugagacagcagua

SEQ ID NO: 27629 - RNA, 20 nt, Artificial Sequence
  HTT spacer sequence GTCN PAM
cagagcugcugacauaaccu

SEQ ID NO: 27630 - RNA, 20 nt, Artificial Sequence
  HTT spacer sequence GTCN PAM
uccucuuguuuacgacguga

SEQ ID NO: 27631 - RNA, 20 nt, Artificial Sequence
  HTT spacer sequence GTCN PAM
uaaacaagaggaagacaaac

SEQ ID NO: 27632 - RNA, 20 nt, Artificial Sequence
  HTT spacer sequence GTCN PAM
uuagcaaggggcucagaaca

SEQ ID NO: 27633 - RNA, 20 nt, Artificial Sequence
  HTT spacer sequence GTCN PAM
cccacccccaaagaccugcc

SEQ ID NO: 27634 - RNA, 20 nt, Artificial Sequence
  HTT spacer sequence GTCN PAM
uugggggugggggacaccua

SEQ ID NO: 27635 - RNA, 20 nt, Artificial Sequence
  HTT spacer sequence GTCN PAM
uuuuuacuaaugagcucaua

SEQ ID NO: 27636 - RNA, 20 nt, Artificial Sequence
  HTT spacer sequence GTCN PAM
auaugcacaugcauggauac

SEQ ID NO: 27637 - RNA, 20 nt, Artificial Sequence
  HTT spacer sequence GTCN PAM
ugagagguguguguguaaaa

SEQ ID NO: 27638 - RNA, 20 nt, Artificial Sequence
  HTT spacer sequence GTCN PAM
guucuuccuggaaguugacu

SEQ ID NO: 27639 - RNA, 20 nt, Artificial Sequence
  HTT spacer sequence GTCN PAM
acuuccaggaagaaccgaca

SEQ ID NO: 27640 - RNA, 20 nt, Artificial Sequence
  HTT spacer sequence GTCN PAM
aaggaaagucaacuuccagg

SEQ ID NO: 27641 - RNA, 20 nt, Artificial Sequence
  HTT spacer sequence GTCN PAM
aguuagccgcgugacggaca

SEQ ID NO: 27642 - RNA, 20 nt, Artificial Sequence
  HTT spacer sequence GTCN PAM
cgcggcuaacuugaccuggc

SEQ ID NO: 27643 - RNA, 20 nt, Artificial Sequence
  HTT spacer sequence GTCN PAM
gucacgcggcuaacuugacc

SEQ ID NO: 27644 - RNA, 20 nt, Artificial Sequence
  HTT spacer sequence GTCN PAM
cacgccuggauguccgucac

SEQ ID NO: 27645 - RNA, 20 nt, Artificial Sequence
  HTT spacer sequence GTCN PAM
gggcagggcucauucauugc

SEQ ID NO: 27646 - RNA, 20 nt, Artificial Sequence
  HTT spacer sequence GTCN PAM
ccauaucagcucucugcaga

SEQ ID NO: 27647 - RNA, 20 nt, Artificial Sequence
  HTT spacer sequence GTCN PAM
uccucccuucugcagagagc

SEQ ID NO: 27648 - RNA, 20 nt, Artificial Sequence
  HTT spacer sequence GTCN PAM
aguuuugggggugggcugug

SEQ ID NO: 27649 - RNA, 20 nt, Artificial Sequence
  HTT spacer sequence GTCN PAM
auguaggugauguuuccagc

SEQ ID NO: 27650 - RNA, 20 nt, Artificial Sequence
  HTT spacer sequence GTCN PAM
acccucauuucugccagcgc

SEQ ID NO: 27651 - RNA, 20 nt, Artificial Sequence
  HTT spacer sequence GTCN PAM
uuucaaggggaaaaugugaa

SEQ ID NO: 27652 - RNA, 20 nt, Artificial Sequence
  HTT spacer sequence GTCN PAM
ggaggggguucagcuucaca

SEQ ID NO: 27653 - RNA, 20 nt, Artificial Sequence
  HTT spacer sequence GTCN PAM
uuuagggcacagggccuucu

SEQ ID NO: 27654 - RNA, 20 nt, Artificial Sequence
  HTT spacer sequence GTCN PAM
uuucagagcccucggagcca

SEQ ID NO: 27655 - RNA, 20 nt, Artificial Sequence
  HTT spacer sequence GTCN PAM
cgagcuccacguggggcuca

SEQ ID NO: 27656 - RNA, 20 nt, Artificial Sequence
  HTT spacer sequence GTCN PAM
acuauccgucccgagcucca

SEQ ID NO: 27657 - RNA, 20 nt, Artificial Sequence
  HTT spacer sequence GTCN PAM
gguggguggagucaggcuuc

SEQ ID NO: 27658 - RNA, 20 nt, Artificial Sequence
  HTT spacer sequence GTCN PAM
ggcuucucuugcuaccugug

SEQ ID NO: 27659 - RNA, 20 nt, Artificial Sequence
  HTT spacer sequence GTCN PAM
gcugggaaggaugcucacag

SEQ ID NO: 27660 - RNA, 20 nt, Artificial Sequence
  HTT spacer sequence GTCN PAM
cucccccgcuuccucccucu

SEQ ID NO: 27661 - RNA, 20 nt, Artificial Sequence
  HTT spacer sequence GTCN PAM
uccccgcagagggaggaagc

SEQ ID NO: 27662 - RNA, 20 nt, Artificial Sequence
  HTT spacer sequence GTCN PAM
cggguccuccccgcagaggg

SEQ ID NO: 27663 - RNA, 20 nt, Artificial Sequence
  HTT spacer sequence GTCN PAM
acccuggccagcagcugugg

SEQ ID NO: 27664 - RNA, 20 nt, Artificial Sequence
  HTT spacer sequence GTCN PAM
uccagaggggucacguguag

SEQ ID NO: 27665 - RNA, 20 nt, Artificial Sequence
  HTT spacer sequence GTCN PAM
cguguaggagugagaagaag

SEQ ID NO: 27666 - RNA, 20 nt, Artificial Sequence
  HTT spacer sequence GTCN PAM
cucagcagcucucaagaucu

SEQ ID NO: 27667 - RNA, 20 nt, Artificial Sequence
  HTT spacer sequence GTCN PAM
gagccauccugagcucucca

SEQ ID NO: 27668 - RNA, 20 nt, Artificial Sequence
  HTT spacer sequence GTCN PAM
ucgucugagccauccugagc

SEQ ID NO: 27669 - RNA, 20 nt, Artificial Sequence
  HTT spacer sequence GTCN PAM
ugcggcauucugagcagcuc

SEQ ID NO: 27670 - RNA, 20 nt, Artificial Sequence
  HTT spacer sequence GTCN PAM
cgcucuggugcagucaaagg

SEQ ID NO: 27671 - RNA, 20 nt, Artificial Sequence
  HTT spacer sequence GTCN PAM
aaggaacgccuuccccucag

SEQ ID NO: 27672 - RNA, 20 nt, Artificial Sequence
  HTT spacer sequence GTCN PAM
cccgcugcaaucuggguggu

SEQ ID NO: 27673 - RNA, 20 nt, Artificial Sequence
  HTT spacer sequence GTCN PAM
acguuggccacgauccucca

SEQ ID NO: 27674 - RNA, 20 nt, Artificial Sequence
  HTT spacer sequence GTCN PAM
gagcccacccuccguaggca

SEQ ID NO: 27675 - RNA, 20 nt, Artificial Sequence
  HTT spacer sequence GTCN PAM
aggucucacugcuuugcacc

SEQ ID NO: 27676 - RNA, 20 nt, Artificial Sequence
  HTT spacer sequence GTCN PAM
cacugcuuugcaccgugguc

SEQ ID NO: 27677 - RNA, 20 nt, Artificial Sequence
  HTT spacer sequence GTCN PAM
gagggacugucagcugagcu

SEQ ID NO: 27678 - RNA, 20 nt, Artificial Sequence
  HTT spacer sequence GTCN PAM
cucugaccacggugcaaagc

SEQ ID NO: 27679 - RNA, 20 nt, Artificial Sequence
  HTT spacer sequence GTCN PAM
gcugagcuugagcuccccug

SEQ ID NO: 27680 - RNA, 20 nt, Artificial Sequence
  HTT spacer sequence GTCN PAM
cggagccccacccagaccug

SEQ ID NO: 27681 - RNA, 20 nt, Artificial Sequence
  HTT spacer sequence GTCN PAM
ggguggggcuccgggacucg

SEQ ID NO: 27682 - RNA, 20 nt, Artificial Sequence
  HTT spacer sequence GTCN PAM
uucccuuugcucucagaagc

SEQ ID NO: 27683 - RNA, 20 nt, Artificial Sequence
  HTT spacer sequence GTCN PAM
guccuucccuuugcucucag

SEQ ID NO: 27684 - RNA, 20 nt, Artificial Sequence
  HTT spacer sequence GTCN PAM
agguucucaugaagcaaagc

SEQ ID NO: 27685 - RNA, 20 nt, Artificial Sequence
  HTT spacer sequence GTCN PAM
uaggaagcagucuccuaagu

SEQ ID NO: 27686 - RNA, 20 nt, Artificial Sequence
  HTT spacer sequence GTCN PAM
ccuaagugcuucuccagcag

SEQ ID NO: 27687 - RNA, 20 nt, Artificial Sequence
  HTT spacer sequence GTCN PAM
caccagcuaacaucuggcau

SEQ ID NO: 27688 - RNA, 20 nt, Artificial Sequence
  HTT spacer sequence GTCN PAM
cccaggcagcugccagcagg

SEQ ID NO: 27689 - RNA, 20 nt, Artificial Sequence
  HTT spacer sequence GTCN PAM
cugcuggcagcugccugggg

SEQ ID NO: 27690 - RNA, 20 nt, Artificial Sequence
  HTT spacer sequence GTCN PAM
uccugcccugcagaugggag

SEQ ID NO: 27691 - RNA, 20 nt, Artificial Sequence
  HTT spacer sequence GTCN PAM
agugacaucauaagcuuaua

SEQ ID NO: 27692 - RNA, 20 nt, Artificial Sequence
  HTT spacer sequence GTCN PAM
cuugaccaugaaggcuccag

SEQ ID NO: 27693 - RNA, 20 nt, Artificial Sequence
  HTT spacer sequence GTCN PAM
uauaagcuuaugaugucacu

SEQ ID NO: 27694 - RNA, 20 nt, Artificial Sequence
  HTT spacer sequence GTCN PAM
ugaggcuuguguaugucaua

SEQ ID NO: 27695 - RNA, 20 nt, Artificial Sequence
  HTT spacer sequence GTCN PAM
ucaggcccagcacagagacu

SEQ ID NO: 27696 - RNA, 20 nt, Artificial Sequence
  HTT spacer sequence GTCN PAM
cugugcugggccugaugacc

SEQ ID NO: 27697 - RNA, 20 nt, Artificial Sequence
  HTT spacer sequence GTCN PAM
auggccaaggagguggaagg

SEQ ID NO: 27698 - RNA, 20 nt, Artificial Sequence
  HTT spacer sequence GTCN PAM
cuggcccagcugcucccagg

SEQ ID NO: 27699 - RNA, 20 nt, Artificial Sequence
  HTT spacer sequence GTCN PAM
gcagggccugccccgucuau

SEQ ID NO: 27700 - RNA, 20 nt, Artificial Sequence
  HTT spacer sequence GTCN PAM
auucuagcuuguuuguccug

SEQ ID NO: 27701 - RNA, 20 nt, Artificial Sequence
  HTT spacer sequence GTCN PAM
ugucugaaccagcgccuacu

SEQ ID NO: 27702 - RNA, 20 nt, Artificial Sequence
  HTT spacer sequence GTCN PAM
gaaccagcgccuacuccaag

SEQ ID NO: 27703 - RNA, 20 nt, Artificial Sequence
  HTT spacer sequence GTCN PAM
ggagcuuagaagcauccccg

SEQ ID NO: 27704 - RNA, 20 nt, Artificial Sequence
  HTT spacer sequence GTCN PAM
ucuugggaugcagaugucuu

SEQ ID NO: 27705 - RNA, 20 nt, Artificial Sequence
  HTT spacer sequence GTCN PAM
uaccaaccugcaagaacaaa

SEQ ID NO: 27706 - RNA, 20 nt, Artificial Sequence
  HTT spacer sequence GTCN PAM
auguuugcugaggucccguc

SEQ ID NO: 27707 - RNA, 20 nt, Artificial Sequence
  HTT spacer sequence GTCN PAM
cgucugguucuggcuaauug

SEQ ID NO: 27708 - RNA, 20 nt, Artificial Sequence
  HTT spacer sequence GTCN PAM
gguucuggcuaauuggcagg

SEQ ID NO: 27709 - RNA, 20 nt, Artificial Sequence
  HTT spacer sequence GTCN PAM
uccacccauucuuucccugc

SEQ ID NO: 27710 - RNA, 20 nt, Artificial Sequence
  HTT spacer sequence GTCN PAM
acccauucuuucccugcucu

SEQ ID NO: 27711 - RNA, 20 nt, Artificial Sequence
  HTT spacer sequence GTCN PAM
gugccaggagagacgggggc

SEQ ID NO: 27712 - RNA, 20 nt, Artificial Sequence
  HTT spacer sequence GTCN PAM
cuccuggcacagacagcaga

SEQ ID NO: 27713 - RNA, 20 nt, Artificial Sequence
  HTT spacer sequence GTCN PAM
gccaaggggccagcuccugc

SEQ ID NO: 27714 - RNA, 20 nt, Artificial Sequence
  HTT spacer sequence GTCN PAM
gccggagggaugugguggac

SEQ ID NO: 27715 - RNA, 20 nt, Artificial Sequence
  HTT spacer sequence GTCN PAM
accacaucccuccggcagac

SEQ ID NO: 27716 - RNA, 20 nt, Artificial Sequence
  HTT spacer sequence GTCN PAM
ccucauaggugacaccgcuc

SEQ ID NO: 27717 - RNA, 20 nt, Artificial Sequence
  HTT spacer sequence GTCN PAM
ccuaugaggagacagauuua

SEQ ID NO: 27718 - RNA, 20 nt, Artificial Sequence
  HTT spacer sequence GTCN PAM
cuucagagaaauggagcacc

SEQ ID NO: 27719 - RNA, 20 nt, Artificial Sequence
  HTT spacer sequence GTCN PAM
agguguggacagccuggcac

SEQ ID NO: 27720 - RNA, 20 nt, Artificial Sequence
  HTT spacer sequence GTCN PAM
acaccuggaccagggagaag

SEQ ID NO: 27721 - RNA, 20 nt, Artificial Sequence
  HTT spacer sequence GTCN PAM
agugggaagcagcggugaac

SEQ ID NO: 27722 - RNA, 20 nt, Artificial Sequence
  HTT spacer sequence GTCN PAM
cuccccaugccacggcagag

SEQ ID NO: 27723 - RNA, 20 nt, Artificial Sequence
  HTT spacer sequence GTCN PAM
ccuugccgagcugugcccug

SEQ ID NO: 27724 - RNA, 20 nt, Artificial Sequence
  HTT spacer sequence GTCN PAM
cuuccccugcguggugcgug

SEQ ID NO: 27725 - RNA, 20 nt, Artificial Sequence
  HTT spacer sequence GTCN PAM
gaugagggaaguagccaggg

SEQ ID NO: 27726 - RNA, 20 nt, Artificial Sequence
  HTT spacer sequence GTCN PAM
cuucaguggcggcuccaccc

SEQ ID NO: 27727 - RNA, 20 nt, Artificial Sequence
  HTT spacer sequence GTCN PAM
caucauguagaggcaaggcc

SEQ ID NO: 27728 - RNA, 20 nt, Artificial Sequence
  HTT spacer sequence GTCN PAM
ucgguuggcugugucacauc

SEQ ID NO: 27729 - RNA, 20 nt, Artificial Sequence
  HTT spacer sequence GTCN PAM
gguccaugagcaccgugaca

SEQ ID NO: 27730 - RNA, 20 nt, Artificial Sequence
  HTT spacer sequence GTCN PAM
augagcaccgugacaguguc

SEQ ID NO: 27731 - RNA, 20 nt, Artificial Sequence
  HTT spacer sequence GTCN PAM
cggugcucauggaccagacu

SEQ ID NO: 27732 - RNA, 20 nt, Artificial Sequence
  HTT spacer sequence GTCN PAM
guggguagagguggacccgg

SEQ ID NO: 27733 - RNA, 20 nt, Artificial Sequence
  HTT spacer sequence GTCN PAM
accucuacccacagacacug

SEQ ID NO: 27734 - RNA, 20 nt, Artificial Sequence
  HTT spacer sequence GTCN PAM
ucaccaggaccucuuuuggg

SEQ ID NO: 27735 - RNA, 20 nt, Artificial Sequence
  HTT spacer sequence GTCN PAM
uggugaugacacaaggccgg

SEQ ID NO: 27736 - RNA, 20 nt, Artificial Sequence
  HTT spacer sequence GTCN PAM
acaugguuucccaaaagagg

SEQ ID NO: 27737 - RNA, 20 nt, Artificial Sequence
  HTT spacer sequence GTCN PAM
cccaggcucugcagccccag

SEQ ID NO: 27738 - RNA, 20 nt, Artificial Sequence
  HTT spacer sequence GTCN PAM
ucuguggcucaagccacuug

SEQ ID NO: 27739 - RNA, 20 nt, Artificial Sequence
  HTT spacer sequence GTCN PAM
uguugcagccacauccucug

SEQ ID NO: 27740 - RNA, 20 nt, Artificial Sequence
  HTT spacer sequence GTCN PAM
uggucgggggugucugggcc

SEQ ID NO: 27741 - RNA, 20 nt, Artificial Sequence
  HTT spacer sequence GTCN PAM
ggggugucugggcccugggu

SEQ ID NO: 27742 - RNA, 20 nt, Artificial Sequence
  HTT spacer sequence GTCN PAM
gggcccugggugggcccugu

SEQ ID NO: 27743 - RNA, 20 nt, Artificial Sequence
  HTT spacer sequence GTCN PAM
acagggcccacccagggccc

SEQ ID NO: 27744 - RNA, 20 nt, Artificial Sequence
  HTT spacer sequence GTCN PAM
gggucagggcaucacuggag

SEQ ID NO: 27745 - RNA, 20 nt, Artificial Sequence
  HTT spacer sequence GTCN PAM
gggcaucacuggaggcagag

SEQ ID NO: 27746 - RNA, 20 nt, Artificial Sequence
  HTT spacer sequence GTCN PAM
ggguuccccuugugugcaca

SEQ ID NO: 27747 - RNA, 20 nt, Artificial Sequence
  HTT spacer sequence GTCN PAM
ggcagcuacccccaaaacug

SEQ ID NO: 27748 - RNA, 20 nt, Artificial Sequence
  HTT spacer sequence GTCN PAM
uagcaguuuuggggguagcu

SEQ ID NO: 27749 - RNA, 20 nt, Artificial Sequence
  HTT spacer sequence GTCN PAM
ugagguggauccuggccccu

SEQ ID NO: 27750 - RNA, 20 nt, Artificial Sequence
  HTT spacer sequence GTCN PAM
agaggguacaggggccagga

SEQ ID NO: 27751 - RNA, 20 nt, Artificial Sequence
  HTT spacer sequence GTCN PAM
aggcuccggagccugcccag

SEQ ID NO: 27752 - RNA, 20 nt, Artificial Sequence
  HTT spacer sequence GTCN PAM
ugggcccaaaucacgggggg

SEQ ID NO: 27753 - RNA, 20 nt, Artificial Sequence
  HTT spacer sequence GTCN PAM
cacugaggggcaccuuccag

SEQ ID NO: 27754 - RNA, 20 nt, Artificial Sequence
  HTT spacer sequence GTCN PAM
guccccauguccugcuggcc

SEQ ID NO: 27755 - RNA, 20 nt, Artificial Sequence
  HTT spacer sequence GTCN PAM
ccauguccugcuggccuguc

SEQ ID NO: 27756 - RNA, 20 nt, Artificial Sequence
  HTT spacer sequence GTCN PAM
ugcuggccugucaggcaggg

SEQ ID NO: 27757 - RNA, 20 nt, Artificial Sequence
  HTT spacer sequence GTCN PAM
ggcagggcagaaaauccacc

SEQ ID NO: 27758 - RNA, 20 nt, Artificial Sequence
  HTT spacer sequence GTCN PAM
aguugggcccagccucauua

SEQ ID NO: 27759 - RNA, 20 nt, Artificial Sequence
  HTT spacer sequence GTCN PAM
caggucugcaccagggacag

SEQ ID NO: 27760 - RNA, 20 nt, Artificial Sequence
  HTT spacer sequence GTCN PAM
gcaccagggacagcuccugc

SEQ ID NO: 27761 - RNA, 20 nt, Artificial Sequence
  HTT spacer sequence GTCN PAM
cuggugcagaccugggacau

SEQ ID NO: 27762 - RNA, 20 nt, Artificial Sequence
  HTT spacer sequence GTCN PAM
ggccucggcaggagcugucc

SEQ ID NO: 27763 - RNA, 20 nt, Artificial Sequence
  HTT spacer sequence GTCN PAM
accagcagcaccugagggag

SEQ ID NO: 27764 - RNA, 20 nt, Artificial Sequence
  HTT spacer sequence GTCN PAM
ccuagggccagaggcugguc

SEQ ID NO: 27765 - RNA, 20 nt, Artificial Sequence
  HTT spacer sequence GTCN PAM
cuacggggucuccuagggcc

SEQ ID NO: 27766 - RNA, 20 nt, Artificial Sequence
  HTT spacer sequence GTCN PAM
cagcaggccaugcagcuuug

SEQ ID NO: 27767 - RNA, 20 nt, Artificial Sequence
  HTT spacer sequence GTCN PAM
ccugcuggggaggggcucgu

SEQ ID NO: 27768 - RNA, 20 nt, Artificial Sequence
  HTT spacer sequence GTCN PAM
ccacaucuguccccugcugg

SEQ ID NO: 27769 - RNA, 20 nt, Artificial Sequence
  HTT spacer sequence GTCN PAM
ucacauuggaggucagugug

SEQ ID NO: 27770 - RNA, 20 nt, Artificial Sequence
  HTT spacer sequence GTCN PAM
gugugagggcucugccucgg

SEQ ID NO: 27771 - RNA, 20 nt, Artificial Sequence
  HTT spacer sequence GTCN PAM
agggccucccaugugcacug

SEQ ID NO: 27772 - RNA, 20 nt, Artificial Sequence
  HTT spacer sequence GTCN PAM
ggugggggcccccggcagug

SEQ ID NO: 27773 - RNA, 20 nt, Artificial Sequence
  HTT spacer sequence GTCN PAM
acuggccagcagcugccccu

SEQ ID NO: 27774 - RNA, 20 nt, Artificial Sequence
  HTT spacer sequence GTCN PAM
uggcugaaggggcagcugcu

SEQ ID NO: 27775 - RNA, 20 nt, Artificial Sequence
  HTT spacer sequence GTCN PAM
ggccuacuguccuggcugaa

SEQ ID NO: 27776 - RNA, 20 nt, Artificial Sequence
  HTT spacer sequence GTCN PAM
ccagcagcuccaagguggau

SEQ ID NO: 27777 - RNA, 20 nt, Artificial Sequence
  HTT spacer sequence GTCN PAM
uggggccucuacgugcccuc

SEQ ID NO: 27778 - RNA, 20 nt, Artificial Sequence
  HTT spacer sequence GTCN PAM
gauccuguuaccccuguugu

SEQ ID NO: 27779 - RNA, 20 nt, Artificial Sequence
  HTT spacer sequence GTCN PAM
uccccacuaaccuguuuccu

SEQ ID NO: 27780 - RNA, 20 nt, Artificial Sequence
  HTT spacer sequence GTCN PAM
uguccuccccacuaaccugu

SEQ ID NO: 27781 - RNA, 20 nt, Artificial Sequence
  HTT spacer sequence GTCN PAM
augcugagucgcuagagcug

SEQ ID NO: 27782 - RNA, 20 nt, Artificial Sequence
  HTT spacer sequence GTCN PAM
cuagagcugcacccagaacc

SEQ ID NO: 27783 - RNA, 20 nt, Artificial Sequence
  HTT spacer sequence GTCN PAM
cagcagugguucugggugca

SEQ ID NO: 27784 - RNA, 20 nt, Artificial Sequence
  HTT spacer sequence GTCN PAM
uggcuacggaaagggcauuc

SEQ ID NO: 27785 - RNA, 20 nt, Artificial Sequence
  HTT spacer sequence GTCN PAM
gaaugcccuuuccguagcca

SEQ ID NO: 27786 - RNA, 20 nt, Artificial Sequence
  HTT spacer sequence GTCN PAM
cugaccucaccggggagggc

SEQ ID NO: 27787 - RNA, 20 nt, Artificial Sequence
  HTT spacer sequence GTCN PAM
gggaccgguccgaaugcccu

SEQ ID NO: 27788 - RNA, 20 nt, Artificial Sequence
  HTT spacer sequence GTCN PAM
cuccuucaucugcaggcacu

SEQ ID NO: 27789 - RNA, 20 nt, Artificial Sequence
  HTT spacer sequence GTCN PAM
gcccuccgugcugggggcug

SEQ ID NO: 27790 - RNA, 20 nt, Artificial Sequence
  HTT spacer sequence GTCN PAM
aguggagaugccccagugcc

SEQ ID NO: 27791 - RNA, 20 nt, Artificial Sequence
  HTT spacer sequence GTCN PAM
ccugaggcccagauggaagg

SEQ ID NO: 27792 - RNA, 20 nt, Artificial Sequence
  HTT spacer sequence GTCN PAM
cuuccaucugggccucagga

SEQ ID NO: 27793 - RNA, 20 nt, Artificial Sequence
  HTT spacer sequence GTCN PAM
agucccuuccaucugggccu

SEQ ID NO: 27794 - RNA, 20 nt, Artificial Sequence
  HTT spacer sequence GTCN PAM
cauggggcugaugguggggc

SEQ ID NO: 27795 - RNA, 20 nt, Artificial Sequence
  HTT spacer sequence GTCN PAM
aggccuggccccaccaucag

SEQ ID NO: 27796 - RNA, 20 nt, Artificial Sequence
  HTT spacer sequence GTCN PAM
cuggucaaggccuggcccca

SEQ ID NO: 27797 - RNA, 20 nt, Artificial Sequence
  HTT spacer sequence GTCN PAM
cugcacccccuacacugggu

SEQ ID NO: 27798 - RNA, 20 nt, Artificial Sequence
  HTT spacer sequence GTCN PAM
ggauaggaaguguaugggga

SEQ ID NO: 27799 - RNA, 20 nt, Artificial Sequence
  HTT spacer sequence GTCN PAM
uuccccugagagccucgguc

SEQ ID NO: 27800 - RNA, 20 nt, Artificial Sequence
  HTT spacer sequence GTCN PAM
caccuccaaggugccucaga

SEQ ID NO: 27801 - RNA, 20 nt, Artificial Sequence
  HTT spacer sequence GTCN PAM
ucugaggcaccuuggaggug

SEQ ID NO: 27802 - RNA, 20 nt, Artificial Sequence
  HTT spacer sequence GTCN PAM
ccugcaguuggucaggccug

SEQ ID NO: 27803 - RNA, 20 nt, Artificial Sequence
  HTT spacer sequence GTCN PAM
ggccugaggagggcaggggg

SEQ ID NO: 27804 - RNA, 20 nt, Artificial Sequence
  HTT spacer sequence GTCN PAM
cucugcugaccacaguggca

SEQ ID NO: 27805 - RNA, 20 nt, Artificial Sequence
  HTT spacer sequence GTCN PAM
gcagagggacagcaggcacc

SEQ ID NO: 27806 - RNA, 20 nt, Artificial Sequence
  HTT spacer sequence GTCN PAM
augcugcacaggugccgugg

SEQ ID NO: 27807 - RNA, 20 nt, Artificial Sequence
  HTT spacer sequence GTCN PAM
ggcagggcucuguggagccc

SEQ ID NO: 27808 - RNA, 20 nt, Artificial Sequence
  HTT spacer sequence GTCN PAM
uccggccagccugggggcau

SEQ ID NO: 27809 - RNA, 20 nt, Artificial Sequence
  HTT spacer sequence GTCN PAM
cucagccccacaggggccug

SEQ ID NO: 27810 - RNA, 20 nt, Artificial Sequence
  HTT spacer sequence GTCN PAM
ccgcacgcugugccgaaucu

SEQ ID NO: 27811 - RNA, 20 nt, Artificial Sequence
  HTT spacer sequence GTCN PAM
ggguacgcagggagcugaug

SEQ ID NO: 27812 - RNA, 20 nt, Artificial Sequence
  HTT spacer sequence GTCN PAM
caaacagagcucaccuuugc

SEQ ID NO: 27813 - RNA, 20 nt, Artificial Sequence
  HTT spacer sequence GTCN PAM
ucaccggccggugccagagg

SEQ ID NO: 27814 - RNA, 20 nt, Artificial Sequence
  HTT spacer sequence GTCN PAM
guguacccugugucugcacc

SEQ ID NO: 27815 - RNA, 20 nt, Artificial Sequence
  HTT spacer sequence GTCN PAM
gcaccucugggcagggccug

SEQ ID NO: 27816 - RNA, 20 nt, Artificial Sequence
  HTT spacer sequence GTCN PAM
gagccaggcccugcccagag

SEQ ID NO: 27817 - RNA, 20 nt, Artificial Sequence
  HTT spacer sequence GTCN PAM
acagaccuaaggcccagggc

SEQ ID NO: 27818 - RNA, 20 nt, Artificial Sequence
  HTT spacer sequence GTCN PAM
guggacacuggaagcccggg

SEQ ID NO: 27819 - RNA, 20 nt, Artificial Sequence
  HTT spacer sequence GTCN PAM
uggggcugggcccucacaag

SEQ ID NO: 27820 - RNA, 20 nt, Artificial Sequence
  HTT spacer sequence GTCN PAM
ugggguccuggggcugggcc

SEQ ID NO: 27821 - RNA, 20 nt, Artificial Sequence
  HTT spacer sequence GTCN PAM
ugguccugggguccuggggc

SEQ ID NO: 27822 - RNA, 20 nt, Artificial Sequence
  HTT spacer sequence GTCN PAM
cacagcccaggacccccacc

SEQ ID NO: 27823 - RNA, 20 nt, Artificial Sequence
  HTT spacer sequence GTCN PAM
ugggcugugggacccuuaag

SEQ ID NO: 27824 - RNA, 20 nt, Artificial Sequence
  HTT spacer sequence GTCN PAM
cccaacgcuggccacuggcc

SEQ ID NO: 27825 - RNA, 20 nt, Artificial Sequence
  HTT spacer sequence GTCN PAM
cucguccucucuguuucucc

SEQ ID NO: 27826 - RNA, 20 nt, Artificial Sequence
  HTT spacer sequence GTCN PAM
ucucuguuucucccaccuuu

SEQ ID NO: 27827 - RNA, 20 nt, Artificial Sequence
  HTT spacer sequence GTCN PAM
gugcagcccugauuccugug

SEQ ID NO: 27828 - RNA, 20 nt, Artificial Sequence
  HTT spacer sequence GTCN PAM
cguuuccauagcaacagagc

SEQ ID NO: 27829 - RNA, 20 nt, Artificial Sequence
  HTT spacer sequence GTCN PAM
uuuugaugucacguuuccau

SEQ ID NO: 27830 - RNA, 20 nt, Artificial Sequence
  HTT spacer sequence GTCN PAM
gauguaggccccauuuugag

SEQ ID NO: 27831 - RNA, 20 nt, Artificial Sequence
  HTT spacer sequence GTCN PAM
ccccaggcggagaagcaccg

SEQ ID NO: 27832 - RNA, 20 nt, Artificial Sequence
  HTT spacer sequence GTCN PAM
aguugcgggcccgccggugc

SEQ ID NO: 27833 - RNA, 20 nt, Artificial Sequence
  HTT spacer sequence GTCN PAM
guccaguugcgggcccgccg

SEQ ID NO: 27834 - RNA, 20 nt, Artificial Sequence
  HTT spacer sequence GTCN PAM
gggaggaguucuucgacgag

SEQ ID NO: 27835 - RNA, 20 nt, Artificial Sequence
  HTT spacer sequence GTCN PAM
aagaacuccucccagaccag

SEQ ID NO: 27836 - RNA, 20 nt, Artificial Sequence
  HTT spacer sequence GTCN PAM
gcuugagcucgucgaagaac

SEQ ID NO: 27837 - RNA, 20 nt, Artificial Sequence
  HTT spacer sequence GTCN PAM
ucucgaagagcuugcuggcc

SEQ ID NO: 27838 - RNA, 20 nt, Artificial Sequence
  HTT spacer sequence GTCN PAM
uguuggugaucuugaucuug

SEQ ID NO: 27839 - RNA, 20 nt, Artificial Sequence
  HTT spacer sequence GTCN PAM
ugguggggcccacacugccc

SEQ ID NO: 27840 - RNA, 20 nt, Artificial Sequence
  HTT spacer sequence GTCN PAM
ggagcggcccgccacgcccg

SEQ ID NO: 27841 - RNA, 20 nt, Artificial Sequence
  HTT spacer sequence GTCN PAM
ggacgaugugugggucgugg

SEQ ID NO: 27842 - RNA, 20 nt, Artificial Sequence
  HTT spacer sequence GTCN PAM
cgacucagagcuccaagaaa

SEQ ID NO: 27843 - RNA, 20 nt, Artificial Sequence
  HTT spacer sequence GTCN PAM
uggccugccugucggucucc

SEQ ID NO: 27844 - RNA, 20 nt, Artificial Sequence
  HTT spacer sequence GTCN PAM
gucuccucuggccggguaug

SEQ ID NO: 27845 - RNA, 20 nt, Artificial Sequence
  HTT spacer sequence GTCN PAM
ccucuggccggguaugggca

SEQ ID NO: 27846 - RNA, 20 nt, Artificial Sequence
  HTT spacer sequence GTCN PAM
caccccgugggguucugccc

SEQ ID NO: 27847 - RNA, 20 nt, Artificial Sequence
  HTT spacer sequence GTCN PAM
aagagcugagggguagcagg

SEQ ID NO: 27848 - RNA, 20 nt, Artificial Sequence
  HTT spacer sequence GTCN PAM
ugggagccauccuggccucu

SEQ ID NO: 27849 - RNA, 20 nt, Artificial Sequence
  HTT spacer sequence GTCN PAM
gggcacugucccucggaggc

SEQ ID NO: 27850 - RNA, 20 nt, Artificial Sequence
  HTT spacer sequence GTCN PAM
cucggaggcagcaacacuca

SEQ ID NO: 27851 - RNA, 20 nt, Artificial Sequence
  HTT spacer sequence GTCN PAM
gugggcaccaccaugagugu

SEQ ID NO: 27852 - RNA, 20 nt, Artificial Sequence
  HTT spacer sequence GTCN PAM
uuggggaaauugagacugca

SEQ ID NO: 27853 - RNA, 20 nt, Artificial Sequence
  HTT spacer sequence GTCN PAM
caauuuccccaaugacgcag

SEQ ID NO: 27854 - RNA, 20 nt, Artificial Sequence
  HTT spacer sequence GTCN PAM
cagagcacugagccuccuuc

SEQ ID NO: 27855 - RNA, 20 nt, Artificial Sequence
  HTT spacer sequence GTCN PAM
cggugggguauuuccagaaa

SEQ ID NO: 27856 - RNA, 20 nt, Artificial Sequence
  HTT spacer sequence GTCN PAM
ugcaccucaccuggugauuu

SEQ ID NO: 27857 - RNA, 20 nt, Artificial Sequence
  HTT spacer sequence GTCN PAM
ugggccagggcaggccucca

SEQ ID NO: 27858 - RNA, 20 nt, Artificial Sequence
  HTT spacer sequence GTCN PAM
ccuccggccuucccugcagg

SEQ ID NO: 27859 - RNA, 20 nt, Artificial Sequence
  HTT spacer sequence GTCN PAM
aggaggggacaggugugguc

SEQ ID NO: 27860 - RNA, 20 nt, Artificial Sequence
  HTT spacer sequence GTCN PAM
ccuccuagacgccaacaucu

SEQ ID NO: 27861 - RNA, 20 nt, Artificial Sequence
  HTT spacer sequence GTCN PAM
cacacacccagcaucuuaaa

SEQ ID NO: 27862 - RNA, 20 nt, Artificial Sequence
  HTT spacer sequence GTCN PAM
ccagcccauuaggacagggu

SEQ ID NO: 27863 - RNA, 20 nt, Artificial Sequence
  HTT spacer sequence GTCN PAM
uaaugggcuggggacccacg

SEQ ID NO: 27864 - RNA, 20 nt, Artificial Sequence
  HTT spacer sequence GTCN PAM
cgggugggcaggggucaugg

SEQ ID NO: 27865 - RNA, 20 nt, Artificial Sequence
  HTT spacer sequence GTCN PAM
ugguggggugaaggucucag

SEQ ID NO: 27866 - RNA, 20 nt, Artificial Sequence
  HTT spacer sequence GTCN PAM
caggcacaggcaaggucaca

SEQ ID NO: 27867 - RNA, 20 nt, Artificial Sequence
  HTT spacer sequence GTCN PAM
caggugcggugagggucuug

SEQ ID NO: 27868 - RNA, 20 nt, Artificial Sequence
  HTT spacer sequence GTCN PAM
ugcagggugugaaggucaua

SEQ ID NO: 27869 - RNA, 20 nt, Artificial Sequence
  HTT spacer sequence GTCN PAM
uaggugugcggugaagguca

SEQ ID NO: 27870 - RNA, 20 nt, Artificial Sequence
  HTT spacer sequence GTCN PAM
cagguguggggugaugguuu

SEQ ID NO: 27871 - RNA, 20 nt, Artificial Sequence
  HTT spacer sequence GTCN PAM
ugcacggagcgaggguggca

SEQ ID NO: 27872 - RNA, 20 nt, Artificial Sequence
  HTT spacer sequence GTCN PAM
aggccgcccacagggccggg

SEQ ID NO: 27873 - RNA, 20 nt, Artificial Sequence
  HTT spacer sequence GTCN PAM
gcuuccaggaugggaguggc

SEQ ID NO: 27874 - RNA, 20 nt, Artificial Sequence
  HTT spacer sequence GTCN PAM
ggcaggugagccuggggcag

SEQ ID NO: 27875 - RNA, 20 nt, Artificial Sequence
  HTT spacer sequence GTCN PAM
ccagcccuagugggaguggg

SEQ ID NO: 27876 - RNA, 20 nt, Artificial Sequence
  HTT spacer sequence GTCN PAM
ggggccuugcugggccucuu

SEQ ID NO: 27877 - RNA, 20 nt, Artificial Sequence
  HTT spacer sequence GTCN PAM
guccggggccuugcugggcc

SEQ ID NO: 27878 - RNA, 20 nt, Artificial Sequence
  HTT spacer sequence GTCN PAM
ccgcuuucaguugcguugau

SEQ ID NO: 27879 - RNA, 20 nt, Artificial Sequence
  HTT spacer sequence GTCN PAM
ggggccuggcccugcccaaa

SEQ ID NO: 27880 - RNA, 20 nt, Artificial Sequence
  HTT spacer sequence GTCN PAM
cggcuuuggggccugccuag

SEQ ID NO: 27881 - RNA, 20 nt, Artificial Sequence
  HTT spacer sequence GTCN PAM
ugcucagcacccuagguccc

SEQ ID NO: 27882 - RNA, 20 nt, Artificial Sequence
  HTT spacer sequence GTCN PAM
caagccagccgcucaaaccc

SEQ ID NO: 27883 - RNA, 20 nt, Artificial Sequence
  HTT spacer sequence GTCN PAM
accgaaccucugaagauacc

SEQ ID NO: 27884 - RNA, 20 nt, Artificial Sequence
  HTT spacer sequence GTCN PAM
ugcucaggcaccuggugagg

SEQ ID NO: 27885 - RNA, 20 nt, Artificial Sequence
  HTT spacer sequence GTCN PAM
cuuccucaccaggugccuga

SEQ ID NO: 27886 - RNA, 20 nt, Artificial Sequence
  HTT spacer sequence GTCN PAM
uggccaccucccacugcccu

SEQ ID NO: 27887 - RNA, 20 nt, Artificial Sequence
  HTT spacer sequence GTCN PAM
gaggggagccugcuggaaca

SEQ ID NO: 27888 - RNA, 20 nt, Artificial Sequence
  HTT spacer sequence GTCN PAM
ggccagguuauucauuauuu

SEQ ID NO: 27889 - RNA, 20 nt, Artificial Sequence
  HTT spacer sequence GTCN PAM
caggggaggguuucugucuc

SEQ ID NO: 27890 - RNA, 20 nt, Artificial Sequence
  HTT spacer sequence GTCN PAM
ccauuccuggaggcugagag

SEQ ID NO: 27891 - RNA, 20 nt, Artificial Sequence
  HTT spacer sequence GTCN PAM
ggaguggaggcccccacucu

SEQ ID NO: 27892 - RNA, 20 nt, Artificial Sequence
  HTT spacer sequence GTCN PAM
gggcuggccaagggcugcac

SEQ ID NO: 27893 - RNA, 20 nt, Artificial Sequence
  HTT spacer sequence GTCN PAM
uggcugaugaagcacuucca

SEQ ID NO: 27894 - RNA, 20 nt, Artificial Sequence
  HTT spacer sequence GTCN PAM
gccuuaguucaccgaggggg

SEQ ID NO: 27895 - RNA, 20 nt, Artificial Sequence
  HTT spacer sequence GTCN PAM
cucucaugcucugggccuca

SEQ ID NO: 27896 - RNA, 20 nt, Artificial Sequence
  HTT spacer sequence GTCN PAM
uuagcagaggaagcuguggc

SEQ ID NO: 27897 - RNA, 20 nt, Artificial Sequence
  HTT spacer sequence GTCN PAM
cccagccacagcuuccucug

SEQ ID NO: 27898 - RNA, 20 nt, Artificial Sequence
  HTT spacer sequence GTCN PAM
uuuuucuuuauacccgcagu

SEQ ID NO: 27899 - RNA, 20 nt, Artificial Sequence
  HTT spacer sequence GTCN PAM
ccccauagcagaggcuuuuc

SEQ ID NO: 27900 - RNA, 20 nt, Artificial Sequence
  HTT spacer sequence GTCN PAM
ucacagccacgugccacccu

SEQ ID NO: 27901 - RNA, 20 nt, Artificial Sequence
  HTT spacer sequence GTCN PAM
ccucucuccuacucuugcua

SEQ ID NO: 27902 - RNA, 20 nt, Artificial Sequence
  HTT spacer sequence GTCN PAM
cucaaaggcagaguggggag

SEQ ID NO: 27903 - RNA, 20 nt, Artificial Sequence
  HTT spacer sequence GTCN PAM
agugaggcagagaugccccu

SEQ ID NO: 27904 - RNA, 20 nt, Artificial Sequence
  HTT spacer sequence GTCN PAM
ggccgccauggggcccugug

SEQ ID NO: 27905 - RNA, 20 nt, Artificial Sequence
  HTT spacer sequence GTCN PAM
ccugccuugaccucccagag

SEQ ID NO: 27906 - RNA, 20 nt, Artificial Sequence
  HTT spacer sequence GTCN PAM
aggcaggagacacagggccc

SEQ ID NO: 27907 - RNA, 20 nt, Artificial Sequence
  HTT spacer sequence GTCN PAM
ccaggccuccccugggccuc

SEQ ID NO: 27908 - RNA, 20 nt, Artificial Sequence
  HTT spacer sequence GTCN PAM
ugcccugagaggcuaagucc

SEQ ID NO: 27909 - RNA, 20 nt, Artificial Sequence
  HTT spacer sequence GTCN PAM
gcaggaguaggugggugcug

SEQ ID NO: 27910 - RNA, 20 nt, Artificial Sequence
  HTT spacer sequence GTCN PAM
cagugguaaugaggcaucag

SEQ ID NO: 27911 - RNA, 20 nt, Artificial Sequence
  HTT spacer sequence GTCN PAM
gggcaggagccuagauccag

SEQ ID NO: 27912 - RNA, 20 nt, Artificial Sequence
  HTT spacer sequence GTCN PAM
uugauauaaaaauagaggcu

SEQ ID NO: 27913 - RNA, 20 nt, Artificial Sequence
  HTT spacer sequence GTCN PAM
cacagcaaaguguggagaug

SEQ ID NO: 27914 - RNA, 20 nt, Artificial Sequence
  HTT spacer sequence GTCN PAM
guaucucaucuccacacuuu

SEQ ID NO: 27915 - RNA, 20 nt, Artificial Sequence
  HTT spacer sequence GTCN PAM
acagcccugagucaguaucu

SEQ ID NO: 27916 - RNA, 20 nt, Artificial Sequence
  HTT spacer sequence GTCN PAM
cucccugaggcauucucucc

SEQ ID NO: 27917 - RNA, 20 nt, Artificial Sequence
  HTT spacer sequence GTCN PAM
agaaacuauagaaaagcaag

SEQ ID NO: 27918 - RNA, 20 nt, Artificial Sequence
  HTT spacer sequence GTCN PAM
uauugcuuuucccuugcuuu

SEQ ID NO: 27919 - RNA, 20 nt, Artificial Sequence
  HTT spacer sequence GTCN PAM
cagcaugcacagauaaccuu

SEQ ID NO: 27920 - RNA, 20 nt, Artificial Sequence
  HTT spacer sequence GTCN PAM
caguauuacuaagguuaucu

SEQ ID NO: 27921 - RNA, 20 nt, Artificial Sequence
  HTT spacer sequence GTCN PAM
ugaagcccagcuucuuucua

SEQ ID NO: 27922 - RNA, 20 nt, Artificial Sequence
  HTT spacer sequence GTCN PAM
auugucaucuugacccugga

SEQ ID NO: 27923 - RNA, 20 nt, Artificial Sequence
  HTT spacer sequence GTCN PAM
ucuugacccuggagccuggc

SEQ ID NO: 27924 - RNA, 20 nt, Artificial Sequence
  HTT spacer sequence GTCN PAM
agaugacaauggacuuagaa

SEQ ID NO: 27925 - RNA, 20 nt, Artificial Sequence
  HTT spacer sequence GTCN PAM
ugcccagccucagcagaggg

SEQ ID NO: 27926 - RNA, 20 nt, Artificial Sequence
  HTT spacer sequence GTCN PAM
cucguuucaggaaauuaaaa

SEQ ID NO: 27927 - RNA, 20 nt, Artificial Sequence
  HTT spacer sequence GTCN PAM
ugcauuuuaauuuccugaaa

SEQ ID NO: 27928 - RNA, 20 nt, Artificial Sequence
  HTT spacer sequence GTCN PAM
gccccgcccgacuggcccua

SEQ ID NO: 27929 - RNA, 20 nt, Artificial Sequence
  HTT spacer sequence GTCN PAM
ggcggggcggacucgcuauc

SEQ ID NO: 27930 - RNA, 20 nt, Artificial Sequence
  HTT spacer sequence GTCN PAM
ccgaguccugugauggcaaa

SEQ ID NO: 27931 - RNA, 20 nt, Artificial Sequence
  HTT spacer sequence GTCN PAM
ugugauggcaaacugccgga

SEQ ID NO: 27932 - RNA, 20 nt, Artificial Sequence
  HTT spacer sequence GTCN PAM
ggcaguuugccaucacagga

SEQ ID NO: 27933 - RNA, 20 nt, Artificial Sequence
  HTT spacer sequence GTCN PAM
cagaccgaggcgucccuguc

SEQ ID NO: 27934 - RNA, 20 nt, Artificial Sequence
  HTT spacer sequence GTCN PAM
gggacguggagggccccggc

SEQ ID NO: 27935 - RNA, 20 nt, Artificial Sequence
  HTT spacer sequence GTCN PAM
cugucgccgcccgcuaaguc

SEQ ID NO: 27936 - RNA, 20 nt, Artificial Sequence
  HTT spacer sequence GTCN PAM
ccgcccgcuaaguccacccc

SEQ ID NO: 27937 - RNA, 20 nt, Artificial Sequence
  HTT spacer sequence GTCN PAM
accccucuguacuucccgua

SEQ ID NO: 27938 - RNA, 20 nt, Artificial Sequence
  HTT spacer sequence GTCN PAM
gagcgaucauccucgaagcg

SEQ ID NO: 27939 - RNA, 20 nt, Artificial Sequence
  HTT spacer sequence GTCN PAM
cuuaaguucagguagugugu

SEQ ID NO: 27940 - RNA, 20 nt, Artificial Sequence
  HTT spacer sequence GTCN PAM
gcuuguccuuccccugcccu

SEQ ID NO: 27941 - RNA, 20 nt, Artificial Sequence
  HTT spacer sequence GTCN PAM
uuccccugcccugggguauc

SEQ ID NO: 27942 - RNA, 20 nt, Artificial Sequence
  HTT spacer sequence GTCN PAM
cuuucucuaaaugguggggg

SEQ ID NO: 27943 - RNA, 20 nt, Artificial Sequence
  HTT spacer sequence GTCN PAM
cuggaggcgcugcccgcagc

SEQ ID NO: 27944 - RNA, 20 nt, Artificial Sequence
  HTT spacer sequence GTCN PAM
gaggccgccugucccuggag

SEQ ID NO: 27945 - RNA, 20 nt, Artificial Sequence
  HTT spacer sequence GTCN PAM
acaggcagaccgaguuuguc

SEQ ID NO: 27946 - RNA, 20 nt, Artificial Sequence
  HTT spacer sequence GTCN PAM
gccuguggacacuaaagccc

SEQ ID NO: 27947 - RNA, 20 nt, Artificial Sequence
  HTT spacer sequence GTCN PAM
cccagcuccaucacuuuuga

SEQ ID NO: 27948 - RNA, 20 nt, Artificial Sequence
  HTT spacer sequence GTCN PAM
aggaacuuuccgugcagcuc

SEQ ID NO: 27949 - RNA, 20 nt, Artificial Sequence
  HTT spacer sequence GTCN PAM
cccuccuauaaaaugggggu

SEQ ID NO: 27950 - RNA, 20 nt, Artificial Sequence
  HTT spacer sequence GTCN PAM
ucucuccugugaugcuccca

SEQ ID NO: 27951 - RNA, 20 nt, Artificial Sequence
  HTT spacer sequence GTCN PAM
cccuccgugugccgggcccc

SEQ ID NO: 27952 - RNA, 20 nt, Artificial Sequence
  HTT spacer sequence GTCN PAM
ggggcuuggucucccuccgu

SEQ ID NO: 27953 - RNA, 20 nt, Artificial Sequence
  HTT spacer sequence GTCN PAM
gugugggcuaagggaggcca

SEQ ID NO: 27954 - RNA, 20 nt, Artificial Sequence
  HTT spacer sequence GTCN PAM
ggcugcaccucaucacgugu

SEQ ID NO: 27955 - RNA, 20 nt, Artificial Sequence
  HTT spacer sequence GTCN PAM
ugcccacggcaacacgugau

SEQ ID NO: 27956 - RNA, 20 nt, Artificial Sequence
  HTT spacer sequence GTCN PAM
ccucugccauccaucccaca

SEQ ID NO: 27957 - RNA, 20 nt, Artificial Sequence
  HTT spacer sequence GTCN PAM
gaggugugggauggauggca

SEQ ID NO: 27958 - RNA, 20 nt, Artificial Sequence
  HTT spacer sequence GTCN PAM
cgugcuggccacgugacugu

SEQ ID NO: 27959 - RNA, 20 nt, Artificial Sequence
  HTT spacer sequence GTCN PAM
cguggccagcacgggacggg

SEQ ID NO: 27960 - RNA, 20 nt, Artificial Sequence
  HTT spacer sequence GTCN PAM
ugcaugcugccuggcucccg

SEQ ID NO: 27961 - RNA, 20 nt, Artificial Sequence
  HTT spacer sequence GTCN PAM
guccugcaugcugccuggcu

SEQ ID NO: 27962 - RNA, 20 nt, Artificial Sequence
  HTT spacer sequence GTCN PAM
ccuccucaaaagcaccuucu

SEQ ID NO: 27963 - RNA, 20 nt, Artificial Sequence
  HTT spacer sequence GTCN PAM
cagcuucuccccugcccugg

SEQ ID NO: 27964 - RNA, 20 nt, Artificial Sequence
  HTT spacer sequence GTCN PAM
ucaagucuuucugacaggag

SEQ ID NO: 27965 - RNA, 20 nt, Artificial Sequence
  HTT spacer sequence GTCN PAM
uucugacaggaggugucaga

SEQ ID NO: 27966 - RNA, 20 nt, Artificial Sequence
  HTT spacer sequence GTCN PAM
gaaagacuugaagaccaggg

SEQ ID NO: 27967 - RNA, 20 nt, Artificial Sequence
  HTT spacer sequence GTCN PAM
gaaaaguaucuuuaguagag

SEQ ID NO: 27968 - RNA, 20 nt, Artificial Sequence
  HTT spacer sequence GTCN PAM
ccgaggagggucccucucau

SEQ ID NO: 27969 - RNA, 20 nt, Artificial Sequence
  HTT spacer sequence GTCN PAM
cucucaugccgggggccgcu

SEQ ID NO: 27970 - RNA, 20 nt, Artificial Sequence
  HTT spacer sequence GTCN PAM
agcagcggcccccggcauga

SEQ ID NO: 27971 - RNA, 20 nt, Artificial Sequence
  HTT spacer sequence GTCN PAM
ucaaugagaaauccugaguc

SEQ ID NO: 27972 - RNA, 20 nt, Artificial Sequence
  HTT spacer sequence GTCN PAM
caggucuucaaugagaaauc

SEQ ID NO: 27973 - RNA, 20 nt, Artificial Sequence
  HTT spacer sequence GTCN PAM
acgggaacaacagccacaaa

SEQ ID NO: 27974 - RNA, 20 nt, Artificial Sequence
  HTT spacer sequence GTCN PAM
gagaacugggcucaguccac

SEQ ID NO: 27975 - RNA, 20 nt, Artificial Sequence
  HTT spacer sequence GTCN PAM
ugugcaaggccccaggcagc

SEQ ID NO: 27976 - RNA, 20 nt, Artificial Sequence
  HTT spacer sequence GTCN PAM
guggguuuuggcagcucccu

SEQ ID NO: 27977 - RNA, 20 nt, Artificial Sequence
  HTT spacer sequence GTCN PAM
gcugagaccacggguggccc

SEQ ID NO: 27978 - RNA, 20 nt, Artificial Sequence
  HTT spacer sequence GTCN PAM
cagcagaccucccugaaggg

SEQ ID NO: 27979 - RNA, 20 nt, Artificial Sequence
  HTT spacer sequence GTCN PAM
agcccugugggcgccuccug

SEQ ID NO: 27980 - RNA, 20 nt, Artificial Sequence
  HTT spacer sequence GTCN PAM
uggggagagagcccaggccu

SEQ ID NO: 27981 - RNA, 20 nt, Artificial Sequence
  HTT spacer sequence GTCN PAM
uucugccucucuaccaaggu

SEQ ID NO: 27982 - RNA, 20 nt, Artificial Sequence
  HTT spacer sequence GTCN PAM
cagaaggaagggccugagau

SEQ ID NO: 27983 - RNA, 20 nt, Artificial Sequence
  HTT spacer sequence GTCN PAM
uggcuucccuacaggggucc

SEQ ID NO: 27984 - RNA, 20 nt, Artificial Sequence
  HTT spacer sequence GTCN PAM
ugaguacucugcacuaccca

SEQ ID NO: 27985 - RNA, 20 nt, Artificial Sequence
  HTT spacer sequence GTCN PAM
cuccaccccuggcccccaac

SEQ ID NO: 27986 - RNA, 20 nt, Artificial Sequence
  HTT spacer sequence GTCN PAM
ggaaagggugggauguucug

SEQ ID NO: 27987 - RNA, 20 nt, Artificial Sequence
  HTT spacer sequence GTCN PAM
ugggacccuggucauugggg

SEQ ID NO: 27988 - RNA, 20 nt, Artificial Sequence
  HTT spacer sequence GTCN PAM
caggacaauccacaccccuu

SEQ ID NO: 27989 - RNA, 20 nt, Artificial Sequence
  HTT spacer sequence GTCN PAM
uuggggucauccgcuagucg

SEQ ID NO: 27990 - RNA, 20 nt, Artificial Sequence
  HTT spacer sequence GTCN PAM
uccgcuagucgcaaaggacg

SEQ ID NO: 27991 - RNA, 20 nt, Artificial Sequence
  HTT spacer sequence GTCN PAM
caaaggacggcaaugccugu

SEQ ID NO: 27992 - RNA, 20 nt, Artificial Sequence
  HTT spacer sequence GTCN PAM
uuugcgacuagcggaugacc

SEQ ID NO: 27993 - RNA, 20 nt, Artificial Sequence
  HTT spacer sequence GTCN PAM
caaaaaaaaaaaaaaagaaa

SEQ ID NO: 27994 - RNA, 20 nt, Artificial Sequence
  HTT spacer sequence GTCN PAM
cgcucuugugcagagagcag

SEQ ID NO: 27995 - RNA, 20 nt, Artificial Sequence
  HTT spacer sequence GTCN PAM
ugaacuccugaccucaggug

SEQ ID NO: 27996 - RNA, 20 nt, Artificial Sequence
  HTT spacer sequence GTCN PAM
ggaguucaagaccagccugg

SEQ ID NO: 27997 - RNA, 20 nt, Artificial Sequence
  HTT spacer sequence GTCN PAM
aaggcgguggguucuggccc

SEQ ID NO: 27998 - RNA, 20 nt, Artificial Sequence
  HTT spacer sequence GTCN PAM
cauauuccaugugcaaagga

SEQ ID NO: 27999 - RNA, 20 nt, Artificial Sequence
  HTT spacer sequence GTCN PAM
cuuacucagggucucauauu

SEQ ID NO: 28000 - RNA, 20 nt, Artificial Sequence
  HTT spacer sequence GTCN PAM
ggucacuuacucagggucuc

SEQ ID NO: 28001 - RNA, 20 nt, Artificial Sequence
  HTT spacer sequence GTCN PAM
ggaggguccggugaggcccc

SEQ ID NO: 28002 - RNA, 20 nt, Artificial Sequence
  HTT spacer sequence GTCN PAM
ggugaggccccuggugugcc

SEQ ID NO: 28003 - RNA, 20 nt, Artificial Sequence
  HTT spacer sequence GTCN PAM
acagccggcacuguccuucc

SEQ ID NO: 28004 - RNA, 20 nt, Artificial Sequence
  HTT spacer sequence GTCN PAM
uuccaggucggaggagcggc

SEQ ID NO: 28005 - RNA, 20 nt, Artificial Sequence
  HTT spacer sequence GTCN PAM
gaggagcggccggugaagaa

SEQ ID NO: 28006 - RNA, 20 nt, Artificial Sequence
  HTT spacer sequence GTCN PAM
ccuccacggcgcggcucagc

SEQ ID NO: 28007 - RNA, 20 nt, Artificial Sequence
  HTT spacer sequence GTCN PAM
agcacgcggcgcaccucgcg

SEQ ID NO: 28008 - RNA, 20 nt, Artificial Sequence
  HTT spacer sequence GTCN PAM
gcuggagaggaucaucacca

SEQ ID NO: 28009 - RNA, 20 nt, Artificial Sequence
  HTT spacer sequence GTCN PAM
agcgucuaggccagcaggcg

SEQ ID NO: 28010 - RNA, 20 nt, Artificial Sequence
  HTT spacer sequence GTCN PAM
aggccagcaggcggcggcgg

SEQ ID NO: 28011 - RNA, 20 nt, Artificial Sequence
  HTT spacer sequence GTCN PAM
ccgcucgcggggcggccccc

SEQ ID NO: 28012 - RNA, 20 nt, Artificial Sequence
  HTT spacer sequence GTCN PAM
cuucugagggguauuuugag

SEQ ID NO: 28013 - RNA, 20 nt, Artificial Sequence
  HTT spacer sequence GTCN PAM
ccagggccuggggguuccuc

SEQ ID NO: 28014 - RNA, 20 nt, Artificial Sequence
  HTT spacer sequence GTCN PAM
ccagcaugaaugcccuuccu

SEQ ID NO: 28015 - RNA, 20 nt, Artificial Sequence
  HTT spacer sequence GTCN PAM
gaggaagggcauucaugcug

SEQ ID NO: 28016 - RNA, 20 nt, Artificial Sequence
  HTT spacer sequence GTCN PAM
uagagccacucuccaguguc

SEQ ID NO: 28017 - RNA, 20 nt, Artificial Sequence
  HTT spacer sequence GTCN PAM
uuacuaucaaugauacuuga

SEQ ID NO: 28018 - RNA, 20 nt, Artificial Sequence
  HTT spacer sequence GTCN PAM
aguaucauugauaguaacga

SEQ ID NO: 28019 - RNA, 20 nt, Artificial Sequence
  HTT spacer sequence GTCN PAM
ucccucaccaggaccucugc

SEQ ID NO: 28020 - RNA, 20 nt, Artificial Sequence
  HTT spacer sequence GTCN PAM
uggugagggaggacacaggg

SEQ ID NO: 28021 - RNA, 20 nt, Artificial Sequence
  HTT spacer sequence GTCN PAM
cuccuuaaauggccucugac

SEQ ID NO: 28022 - RNA, 20 nt, Artificial Sequence
  HTT spacer sequence GTCN PAM
gaggccauuuaaggagagac

SEQ ID NO: 28023 - RNA, 20 nt, Artificial Sequence
  HTT spacer sequence GTCN PAM
cugggguuuucaucaggcgu

SEQ ID NO: 28024 - RNA, 20 nt, Artificial Sequence
  HTT spacer sequence GTCN PAM
uugcuaaggaggcaguggaa

SEQ ID NO: 28025 - RNA, 20 nt, Artificial Sequence
  HTT spacer sequence GTCN PAM
uaacaccuguucacaugcac

SEQ ID NO: 28026 - RNA, 20 nt, Artificial Sequence
  HTT spacer sequence GTCN PAM
uccaccaugauaucuccagc

SEQ ID NO: 28027 - RNA, 20 nt, Artificial Sequence
  HTT spacer sequence GTCN PAM
uccccgcaugggagcauaag

SEQ ID NO: 28028 - RNA, 20 nt, Artificial Sequence
  HTT spacer sequence GTCN PAM
guagagaaaugguugcaggu

SEQ ID NO: 28029 - RNA, 20 nt, Artificial Sequence
  HTT spacer sequence GTCN PAM
ucaggccaaccccucccuuc

SEQ ID NO: 28030 - RNA, 20 nt, Artificial Sequence
  HTT spacer sequence GTCN PAM
gccuccguguccucaggcca

SEQ ID NO: 28031 - RNA, 20 nt, Artificial Sequence
  HTT spacer sequence GTCN PAM
ucugccucugggccuucgca

SEQ ID NO: 28032 - RNA, 20 nt, Artificial Sequence
  HTT spacer sequence GTCN PAM
uuuggccagugcagcucugg

SEQ ID NO: 28033 - RNA, 20 nt, Artificial Sequence
  HTT spacer sequence GTCN PAM
gacaucggugggggacagag

SEQ ID NO: 28034 - RNA, 20 nt, Artificial Sequence
  HTT spacer sequence GTCN PAM
gacccagagcugcacuggcc

SEQ ID NO: 28035 - RNA, 20 nt, Artificial Sequence
  HTT spacer sequence GTCN PAM
cccaccgaugucagacccag

SEQ ID NO: 28036 - RNA, 20 nt, Artificial Sequence
  HTT spacer sequence GTCN PAM
cggccaaggaggcucauaga

SEQ ID NO: 28037 - RNA, 20 nt, Artificial Sequence
  HTT spacer sequence GTCN PAM
gguugcccuggcugcaaagg

SEQ ID NO: 28038 - RNA, 20 nt, Artificial Sequence
  HTT spacer sequence GTCN PAM
ccuccuggaauuaggcaagu

SEQ ID NO: 28039 - RNA, 20 nt, Artificial Sequence
  HTT spacer sequence GTCN PAM
gcaggugaacagcaugguuu

SEQ ID NO: 28040 - RNA, 20 nt, Artificial Sequence
  HTT spacer sequence GTCN PAM
aaccaugcuguucaccugcu

SEQ ID NO: 28041 - RNA, 20 nt, Artificial Sequence
  HTT spacer sequence GTCN PAM
ccacggccugcucgcuuggc

SEQ ID NO: 28042 - RNA, 20 nt, Artificial Sequence
  HTT spacer sequence GTCN PAM
uccugcgacaagcagcagca

SEQ ID NO: 28043 - RNA, 20 nt, Artificial Sequence
  HTT spacer sequence GTCN PAM
caggaugacugcagcacugc

SEQ ID NO: 28044 - RNA, 20 nt, Artificial Sequence
  HTT spacer sequence GTCN PAM
ugaggucagccaggcaagag

SEQ ID NO: 28045 - RNA, 20 nt, Artificial Sequence
  HTT spacer sequence GTCN PAM
gccaggcaagagagcagcuu

SEQ ID NO: 28046 - RNA, 20 nt, Artificial Sequence
  HTT spacer sequence GTCN PAM
aagcugcucucuugccuggc

SEQ ID NO: 28047 - RNA, 20 nt, Artificial Sequence
  HTT spacer sequence GTCN PAM
cacacccaguggaguccaag

SEQ ID NO: 28048 - RNA, 20 nt, Artificial Sequence
  HTT spacer sequence GTCN PAM
acaggcuggucccacaccca

SEQ ID NO: 28049 - RNA, 20 nt, Artificial Sequence
  HTT spacer sequence GTCN PAM
uggagcucccacccuccuca

SEQ ID NO: 28050 - RNA, 20 nt, Artificial Sequence
  HTT spacer sequence GTCN PAM
ucggcacacaggcucugggg

SEQ ID NO: 28051 - RNA, 20 nt, Artificial Sequence
  HTT spacer sequence GTCN PAM
ugaggguguaaggagcggcg

SEQ ID NO: 28052 - RNA, 20 nt, Artificial Sequence
  HTT spacer sequence GTCN PAM
ucuggcagcuggaaacuggc

SEQ ID NO: 28053 - RNA, 20 nt, Artificial Sequence
  HTT spacer sequence GTCN PAM
gcggcgucaucuggcagcug

SEQ ID NO: 28054 - RNA, 20 nt, Artificial Sequence
  HTT spacer sequence GTCN PAM
uccuggggccacccuuccuu

SEQ ID NO: 28055 - RNA, 20 nt, Artificial Sequence
  HTT spacer sequence GTCN PAM
cggagcuggaaacuggcuag

SEQ ID NO: 28056 - RNA, 20 nt, Artificial Sequence
  HTT spacer sequence GTCN PAM
ugccuacgaggcgggugggu

SEQ ID NO: 28057 - RNA, 20 nt, Artificial Sequence
  HTT spacer sequence GTCN PAM
aguuggagcccaguguguuu

SEQ ID NO: 28058 - RNA, 20 nt, Artificial Sequence
  HTT spacer sequence GTCN PAM
uggcuggguucccagcaucu

SEQ ID NO: 28059 - RNA, 20 nt, Artificial Sequence
  HTT spacer sequence GTCN PAM
gcagcugggggcaggugccu

SEQ ID NO: 28060 - RNA, 20 nt, Artificial Sequence
  HTT spacer sequence GTCN PAM
caagcccucgagagggaagg

SEQ ID NO: 28061 - RNA, 20 nt, Artificial Sequence
  HTT spacer sequence GTCN PAM
agccuaaccuuccugccagg

SEQ ID NO: 28062 - RNA, 20 nt, Artificial Sequence
  HTT spacer sequence GTCN PAM
ugugggagcguccagccuaa

SEQ ID NO: 28063 - RNA, 20 nt, Artificial Sequence
  HTT spacer sequence GTCN PAM
gccaugacgcaccgguacuu

SEQ ID NO: 28064 - RNA, 20 nt, Artificial Sequence
  HTT spacer sequence GTCN PAM
uggcugacucuacagcaguu

SEQ ID NO: 28065 - RNA, 20 nt, Artificial Sequence
  HTT spacer sequence GTCN PAM
cggaugccuggcaguuacug

SEQ ID NO: 28066 - RNA, 20 nt, Artificial Sequence
  HTT spacer sequence GTCN PAM
cugcugugcuuggguuagaa

SEQ ID NO: 28067 - RNA, 20 nt, Artificial Sequence
  HTT spacer sequence GTCN PAM
guuuucuucucgcccucucu

SEQ ID NO: 28068 - RNA, 20 nt, Artificial Sequence
  HTT spacer sequence GTCN PAM
gugauucaugcccuuccauc

SEQ ID NO: 28069 - RNA, 20 nt, Artificial Sequence
  HTT spacer sequence GTCN PAM
ggcagcgccugccccuucuc

SEQ ID NO: 28070 - RNA, 20 nt, Artificial Sequence
  HTT spacer sequence GTCN PAM
gcagaacucagcuguagaau

SEQ ID NO: 28071 - RNA, 20 nt, Artificial Sequence
  HTT spacer sequence GTCN PAM
uuaacaacuuucugauuucu

SEQ ID NO: 28072 - RNA, 20 nt, Artificial Sequence
  HTT spacer sequence GTCN PAM
auuaaggagaaaaaaaauga

SEQ ID NO: 28073 - RNA, 20 nt, Artificial Sequence
  HTT spacer sequence GTCN PAM
aaacaacaugaaauacuaca

SEQ ID NO: 28074 - RNA, 20 nt, Artificial Sequence
  HTT spacer sequence GTCN PAM
ggaguucaagaccagccuga

SEQ ID NO: 28075 - RNA, 20 nt, Artificial Sequence
  HTT spacer sequence GTCN PAM
ugaacuccugaccucagagg

SEQ ID NO: 28076 - RNA, 20 nt, Artificial Sequence
  HTT spacer sequence GTCN PAM
ggcuggucuugaacuccuga

SEQ ID NO: 28077 - RNA, 20 nt, Artificial Sequence
  HTT spacer sequence GTCN PAM
uuacuaaaaauacaaaauua

SEQ ID NO: 28078 - RNA, 20 nt, Artificial Sequence
  HTT spacer sequence GTCN PAM
cccaggcuggagugcagugg

SEQ ID NO: 28079 - RNA, 20 nt, Artificial Sequence
  HTT spacer sequence GTCN PAM
caaaaaaaaaaaaaaauuaa

SEQ ID NO: 28080 - RNA, 20 nt, Artificial Sequence
  HTT spacer sequence GTCN PAM
uuuguacauuuggcuuucug

SEQ ID NO: 28081 - RNA, 20 nt, Artificial Sequence
  HTT spacer sequence GTCN PAM
uguuccuucuggguuaaauu

SEQ ID NO: 28082 - RNA, 20 nt, Artificial Sequence
  HTT spacer sequence GTCN PAM
uacugaaaaaucuaaauaau

SEQ ID NO: 28083 - RNA, 20 nt, Artificial Sequence
  HTT spacer sequence GTCN PAM
augucaucauuuuauuaaug

SEQ ID NO: 28084 - RNA, 20 nt, Artificial Sequence
  HTT spacer sequence GTCN PAM
ucauuuuauuaaugucauuc

SEQ ID NO: 28085 - RNA, 20 nt, Artificial Sequence
  HTT spacer sequence GTCN PAM
uuccaaacauagucucaaua

SEQ ID NO: 28086 - RNA, 20 nt, Artificial Sequence
  HTT spacer sequence GTCN PAM
caauaauaucacuucuuggu

SEQ ID NO: 28087 - RNA, 20 nt, Artificial Sequence
  HTT spacer sequence GTCN PAM
aaaccaagaagugauauuau

SEQ ID NO: 28088 - RNA, 20 nt, Artificial Sequence
  HTT spacer sequence GTCN PAM
augucaaaaccaagaaguga

SEQ ID NO: 28089 - RNA, 20 nt, Artificial Sequence
  HTT spacer sequence GTCN PAM
aaggccagucagcgugagaa

SEQ ID NO: 28090 - RNA, 20 nt, Artificial Sequence
  HTT spacer sequence GTCN PAM
gcgugagaagaccgcucggc

SEQ ID NO: 28091 - RNA, 20 nt, Artificial Sequence
  HTT spacer sequence GTCN PAM
ucucacgcugacuggccuug

SEQ ID NO: 28092 - RNA, 20 nt, Artificial Sequence
  HTT spacer sequence GTCN PAM
gggaguuggaaccgcagacu

SEQ ID NO: 28093 - RNA, 20 nt, Artificial Sequence
  HTT spacer sequence GTCN PAM
gcgguuccaacuccccgacu

SEQ ID NO: 28094 - RNA, 20 nt, Artificial Sequence
  HTT spacer sequence GTCN PAM
uggccuccagcagccacaug

SEQ ID NO: 28095 - RNA, 20 nt, Artificial Sequence
  HTT spacer sequence GTCN PAM
ggaaauggagacuccugcgu

SEQ ID NO: 28096 - RNA, 20 nt, Artificial Sequence
  HTT spacer sequence GTCN PAM
ccauuucccgacguucgucc

SEQ ID NO: 28097 - RNA, 20 nt, Artificial Sequence
  HTT spacer sequence GTCN PAM
cguccuaaagcugaagaaac

SEQ ID NO: 28098 - RNA, 20 nt, Artificial Sequence
  HTT spacer sequence GTCN PAM
uaaagcugaagaaacgcauu

SEQ ID NO: 28099 - RNA, 20 nt, Artificial Sequence
  HTT spacer sequence GTCN PAM
gugccacuccuagacaggcc

SEQ ID NO: 28100 - RNA, 20 nt, Artificial Sequence
  HTT spacer sequence GTCN PAM
aggaguggcacugaccagag

SEQ ID NO: 28101 - RNA, 20 nt, Artificial Sequence
  HTT spacer sequence GTCN PAM
ucaaacuggucugaggaccc

SEQ ID NO: 28102 - RNA, 20 nt, Artificial Sequence
  HTT spacer sequence GTCN PAM
gaggaccccucaacgcucuu

SEQ ID NO: 28103 - RNA, 20 nt, Artificial Sequence
  HTT spacer sequence GTCN PAM
ucagaccaguuugaggacgg

SEQ ID NO: 28104 - RNA, 20 nt, Artificial Sequence
  HTT spacer sequence GTCN PAM
uggccucccaaagugcuggg

SEQ ID NO: 28105 - RNA, 20 nt, Artificial Sequence
  HTT spacer sequence GTCN PAM
ggacauugagaucauccugg

SEQ ID NO: 28106 - RNA, 20 nt, Artificial Sequence
  HTT spacer sequence GTCN PAM
ugaccucgugauccgccugu

SEQ ID NO: 28107 - RNA, 20 nt, Artificial Sequence
  HTT spacer sequence GTCN PAM
cuacuaaaaauacaaaaaau

SEQ ID NO: 28108 - RNA, 20 nt, Artificial Sequence
  HTT spacer sequence GTCN PAM
cagcuacuugggaggcugag

SEQ ID NO: 28109 - RNA, 20 nt, Artificial Sequence
  HTT spacer sequence GTCN PAM
cgcucugcugcccaggcugg

SEQ ID NO: 28110 - RNA, 20 nt, Artificial Sequence
  HTT spacer sequence GTCN PAM
caaaaaaaaauaauaaauaa

SEQ ID NO: 28111 - RNA, 20 nt, Artificial Sequence
  HTT spacer sequence GTCN PAM
uuagaacucacauaagcaaa

SEQ ID NO: 28112 - RNA, 20 nt, Artificial Sequence
  HTT spacer sequence GTCN PAM
cagguuuaauuucuaauaag

SEQ ID NO: 28113 - RNA, 20 nt, Artificial Sequence
  HTT spacer sequence GTCN PAM
uggguuuauugcuauuuuga

SEQ ID NO: 28114 - RNA, 20 nt, Artificial Sequence
  HTT spacer sequence GTCN PAM
uaaaucucuggcuuaagaga

SEQ ID NO: 28115 - RNA, 20 nt, Artificial Sequence
  HTT spacer sequence GTCN PAM
guccacuuuggggguguuuu

SEQ ID NO: 28116 - RNA, 20 nt, Artificial Sequence
  HTT spacer sequence GTCN PAM
acuuuggggguguuuugguu

SEQ ID NO: 28117 - RNA, 20 nt, Artificial Sequence
  HTT spacer sequence GTCN PAM
aguguuggaauaggaucacg

SEQ ID NO: 28118 - RNA, 20 nt, Artificial Sequence
  HTT spacer sequence GTCN PAM
ccaaaaaaaaaaaacaaacc

SEQ ID NO: 28119 - RNA, 20 nt, Artificial Sequence
  HTT spacer sequence GTCN PAM
cgcucugucacucaggcugg

SEQ ID NO: 28120 - RNA, 20 nt, Artificial Sequence
  HTT spacer sequence GTCN PAM
cucaggcuggagugcagugg

SEQ ID NO: 28121 - RNA, 20 nt, Artificial Sequence
  HTT spacer sequence GTCN PAM
cagcuacucaggaggcugag

SEQ ID NO: 28122 - RNA, 20 nt, Artificial Sequence
  HTT spacer sequence GTCN PAM
caaucuccugacaucgugau

SEQ ID NO: 28123 - RNA, 20 nt, Artificial Sequence
  HTT spacer sequence GTCN PAM
ggagauugagaccauccugg

SEQ ID NO: 28124 - RNA, 20 nt, Artificial Sequence
  HTT spacer sequence GTCN PAM
gccgggcuaacaccuguaau

SEQ ID NO: 28125 - RNA, 20 nt, Artificial Sequence
  HTT spacer sequence GTCN PAM
gucuugugcuucaaggacuc

SEQ ID NO: 28126 - RNA, 20 nt, Artificial Sequence
  HTT spacer sequence GTCN PAM
ugugcuucaaggacucuguc

SEQ ID NO: 28127 - RNA, 20 nt, Artificial Sequence
  HTT spacer sequence GTCN PAM
uugaagcacaagacggacca

SEQ ID NO: 28128 - RNA, 20 nt, Artificial Sequence
  HTT spacer sequence GTCN PAM
aucaugccuuugugaccuca

SEQ ID NO: 28129 - RNA, 20 nt, Artificial Sequence
  HTT spacer sequence GTCN PAM
caaaggcaugauggacagag

SEQ ID NO: 28130 - RNA, 20 nt, Artificial Sequence
  HTT spacer sequence GTCN PAM
gcauuuggaauauccgcaua

SEQ ID NO: 28131 - RNA, 20 nt, Artificial Sequence
  HTT spacer sequence GTCN PAM
uucaguuggaaaggugguga

SEQ ID NO: 28132 - RNA, 20 nt, Artificial Sequence
  HTT spacer sequence GTCN PAM
uucagaauucugauuuuugc

SEQ ID NO: 28133 - RNA, 20 nt, Artificial Sequence
  HTT spacer sequence GTCN PAM
gcuauuuucuuugaaugaga

SEQ ID NO: 28134 - RNA, 20 nt, Artificial Sequence
  HTT spacer sequence GTCN PAM
cauucaaagaaaauagcuga

SEQ ID NO: 28135 - RNA, 20 nt, Artificial Sequence
  HTT spacer sequence GTCN PAM
gccaggacacccaaggcuga

SEQ ID NO: 28136 - RNA, 20 nt, Artificial Sequence
  HTT spacer sequence GTCN PAM
uggcagacuuuuuuuuuuug

SEQ ID NO: 28137 - RNA, 20 nt, Artificial Sequence
  HTT spacer sequence GTCN PAM
ggaucuggaacacacguaug

SEQ ID NO: 28138 - RNA, 20 nt, Artificial Sequence
  HTT spacer sequence GTCN PAM
acgcugaggaaaugcaggug

SEQ ID NO: 28139 - RNA, 20 nt, Artificial Sequence
  HTT spacer sequence GTCN PAM
ugcccgagcaacuggaaggc

SEQ ID NO: 28140 - RNA, 20 nt, Artificial Sequence
  HTT spacer sequence GTCN PAM
acaucuuuucaacguccugc

SEQ ID NO: 28141 - RNA, 20 nt, Artificial Sequence
  HTT spacer sequence GTCN PAM
agaccucacacacucgacca

SEQ ID NO: 28142 - RNA, 20 nt, Artificial Sequence
  HTT spacer sequence GTCN PAM
ugaccccuggguccacaucu

SEQ ID NO: 28143 - RNA, 20 nt, Artificial Sequence
  HTT spacer sequence GTCN PAM
agugugugaggucuugaccc

SEQ ID NO: 28144 - RNA, 20 nt, Artificial Sequence
  HTT spacer sequence GTCN PAM
gugauggagugaaaaugguc

SEQ ID NO: 28145 - RNA, 20 nt, Artificial Sequence
  HTT spacer sequence GTCN PAM
cuuccaaauguccgugaugg

SEQ ID NO: 28146 - RNA, 20 nt, Artificial Sequence
  HTT spacer sequence GTCN PAM
ugccacaucagugcgcaugu

SEQ ID NO: 28147 - RNA, 20 nt, Artificial Sequence
  HTT spacer sequence GTCN PAM
gcuccgugaagaccccguga

SEQ ID NO: 28148 - RNA, 20 nt, Artificial Sequence
  HTT spacer sequence GTCN PAM
ucacggagcugacaugcgca

SEQ ID NO: 28149 - RNA, 20 nt, Artificial Sequence
  HTT spacer sequence GTCN PAM
ucacggggucuucacggagc

SEQ ID NO: 28150 - RNA, 20 nt, Artificial Sequence
  HTT spacer sequence GTCN PAM
gaugaucacggggucuucac

SEQ ID NO: 28151 - RNA, 20 nt, Artificial Sequence
  HTT spacer sequence GTCN PAM
cugagguugcagcugcuuuc

SEQ ID NO: 28152 - RNA, 20 nt, Artificial Sequence
  HTT spacer sequence GTCN PAM
ccaagggucccugagguugc

SEQ ID NO: 28153 - RNA, 20 nt, Artificial Sequence
  HTT spacer sequence GTCN PAM
cggccugugggucaccaagg

SEQ ID NO: 28154 - RNA, 20 nt, Artificial Sequence
  HTT spacer sequence GTCN PAM
ccugugugcccgcuccagca

SEQ ID NO: 28155 - RNA, 20 nt, Artificial Sequence
  HTT spacer sequence GTCN PAM
guccuugcccgguacccaga

SEQ ID NO: 28156 - RNA, 20 nt, Artificial Sequence
  HTT spacer sequence GTCN PAM
uugcccgguacccagagcug

SEQ ID NO: 28157 - RNA, 20 nt, Artificial Sequence
  HTT spacer sequence GTCN PAM
accaaucgccagugagccag

SEQ ID NO: 28158 - RNA, 20 nt, Artificial Sequence
  HTT spacer sequence GTCN PAM
cacaaaggggcccuccgugu

SEQ ID NO: 28159 - RNA, 20 nt, Artificial Sequence
  HTT spacer sequence GTCN PAM
cacggagggccccuuugugu

SEQ ID NO: 28160 - RNA, 20 nt, Artificial Sequence
  HTT spacer sequence GTCN PAM
ucacagacagcgugugggaa

SEQ ID NO: 28161 - RNA, 20 nt, Artificial Sequence
  HTT spacer sequence GTCN PAM
gugaugacgccacccaguca

SEQ ID NO: 28162 - RNA, 20 nt, Artificial Sequence
  HTT spacer sequence GTCN PAM
cucugggcccgcuugggggc

SEQ ID NO: 28163 - RNA, 20 nt, Artificial Sequence
  HTT spacer sequence GTCN PAM
uguaggcacuggggauaggg

SEQ ID NO: 28164 - RNA, 20 nt, Artificial Sequence
  HTT spacer sequence GTCN PAM
gguggaaagcagauacaaau

SEQ ID NO: 28165 - RNA, 20 nt, Artificial Sequence
  HTT spacer sequence GTCN PAM
uuacaggguuucgaguugag

SEQ ID NO: 28166 - RNA, 20 nt, Artificial Sequence
  HTT spacer sequence GTCN PAM
agccccacccucaacucgaa

SEQ ID NO: 28167 - RNA, 20 nt, Artificial Sequence
  HTT spacer sequence GTCN PAM
aguauguuagaagagaggug

SEQ ID NO: 28168 - RNA, 20 nt, Artificial Sequence
  HTT spacer sequence GTCN PAM
ugugagcggauggaguggga

SEQ ID NO: 28169 - RNA, 20 nt, Artificial Sequence
  HTT spacer sequence GTCN PAM
aggugggagcuggcucugag

SEQ ID NO: 28170 - RNA, 20 nt, Artificial Sequence
  HTT spacer sequence GTCN PAM
aggcccaccucgcccucaga

SEQ ID NO: 28171 - RNA, 20 nt, Artificial Sequence
  HTT spacer sequence GTCN PAM
cuguccaggcccaccucgcc

SEQ ID NO: 28172 - RNA, 20 nt, Artificial Sequence
  HTT spacer sequence GTCN PAM
cagcagaaagcagggugucc

SEQ ID NO: 28173 - RNA, 20 nt, Artificial Sequence
  HTT spacer sequence GTCN PAM
cggagcagggagggucaggu

SEQ ID NO: 28174 - RNA, 20 nt, Artificial Sequence
  HTT spacer sequence GTCN PAM
gguguggcguggagccuggg

SEQ ID NO: 28175 - RNA, 20 nt, Artificial Sequence
  HTT spacer sequence GTCN PAM
aaccauucuauccuccccua

SEQ ID NO: 28176 - RNA, 20 nt, Artificial Sequence
  HTT spacer sequence GTCN PAM
uggagauggccacgagcgca

SEQ ID NO: 28177 - RNA, 20 nt, Artificial Sequence
  HTT spacer sequence GTCN PAM
ggagggagagggcacccuac

SEQ ID NO: 28178 - RNA, 20 nt, Artificial Sequence
  HTT spacer sequence GTCN PAM
ccaggggcuuccaacuggcu

SEQ ID NO: 28179 - RNA, 20 nt, Artificial Sequence
  HTT spacer sequence GTCN PAM
guucuuggcuucuauuuuag

SEQ ID NO: 28180 - RNA, 20 nt, Artificial Sequence
  HTT spacer sequence GTCN PAM
cucacagaugugucaguucu

SEQ ID NO: 28181 - RNA, 20 nt, Artificial Sequence
  HTT spacer sequence GTCN PAM
ugucccucacagauguguca

SEQ ID NO: 28182 - RNA, 20 nt, Artificial Sequence
  HTT spacer sequence GTCN PAM
cugcacaagccacggaugua

SEQ ID NO: 28183 - RNA, 20 nt, Artificial Sequence
  HTT spacer sequence GTCN PAM
cacuucccugagcugagggg

SEQ ID NO: 28184 - RNA, 20 nt, Artificial Sequence
  HTT spacer sequence GTCN PAM
accuggugccuuucgcugcc

SEQ ID NO: 28185 - RNA, 20 nt, Artificial Sequence
  HTT spacer sequence GTCN PAM
aggcuaaucugcucuccugc

SEQ ID NO: 28186 - RNA, 20 nt, Artificial Sequence
  HTT spacer sequence GTCN PAM
agaccuugagcgccucgucc

SEQ ID NO: 28187 - RNA, 20 nt, Artificial Sequence
  HTT spacer sequence GTCN PAM
ggacaugguggugcagagca

SEQ ID NO: 28188 - RNA, 20 nt, Artificial Sequence
  HTT spacer sequence GTCN PAM
cccacaaaugucauauuuac

SEQ ID NO: 28189 - RNA, 20 nt, Artificial Sequence
  HTT spacer sequence GTCN PAM
uauuuacccccuagaggacc

SEQ ID NO: 28190 - RNA, 20 nt, Artificial Sequence
  HTT spacer sequence GTCN PAM
ucuaggggguaaauaugaca

SEQ ID NO: 28191 - RNA, 20 nt, Artificial Sequence
  HTT spacer sequence GTCN PAM
ucuagguccucuagggggua

SEQ ID NO: 28192 - RNA, 20 nt, Artificial Sequence
  HTT spacer sequence GTCN PAM
caggucugcccuccccguug

SEQ ID NO: 28193 - RNA, 20 nt, Artificial Sequence
  HTT spacer sequence GTCN PAM
gcccuccccguuggggccaa

SEQ ID NO: 28194 - RNA, 20 nt, Artificial Sequence
  HTT spacer sequence GTCN PAM
ggcacuuggccccaacgggg

SEQ ID NO: 28195 - RNA, 20 nt, Artificial Sequence
  HTT spacer sequence GTCN PAM
cagccuuucuuagggagugc

SEQ ID NO: 28196 - RNA, 20 nt, Artificial Sequence
  HTT spacer sequence GTCN PAM
ucucucgcccugggcacacc

SEQ ID NO: 28197 - RNA, 20 nt, Artificial Sequence
  HTT spacer sequence GTCN PAM
ggggucuuggacagcucuuc

SEQ ID NO: 28198 - RNA, 20 nt, Artificial Sequence
  HTT spacer sequence GTCN PAM
uggacagcucuuccuaggag

SEQ ID NO: 28199 - RNA, 20 nt, Artificial Sequence
  HTT spacer sequence GTCN PAM
aagaccccagacauccccuc

SEQ ID NO: 28200 - RNA, 20 nt, Artificial Sequence
  HTT spacer sequence GTCN PAM
cggaggaagcccugcagcuu

SEQ ID NO: 28201 - RNA, 20 nt, Artificial Sequence
  HTT spacer sequence GTCN PAM
gaucucacagagacugugug

SEQ ID NO: 28202 - RNA, 20 nt, Artificial Sequence
  HTT spacer sequence GTCN PAM
cugugagaucggacucaggc

SEQ ID NO: 28203 - RNA, 20 nt, Artificial Sequence
  HTT spacer sequence GTCN PAM
cgagggcgagcagcagcuca

SEQ ID NO: 28204 - RNA, 20 nt, Artificial Sequence
  HTT spacer sequence GTCN PAM
guccccugcccaggcuuuuc

SEQ ID NO: 28205 - RNA, 20 nt, Artificial Sequence
  HTT spacer sequence GTCN PAM
ccugcccaggcuuuucucgc

SEQ ID NO: 28206 - RNA, 20 nt, Artificial Sequence
  HTT spacer sequence GTCN PAM
ucucgugggucccuuacuga

SEQ ID NO: 28207 - RNA, 20 nt, Artificial Sequence
  HTT spacer sequence GTCN PAM
cuuacugauggagagacugu

SEQ ID NO: 28208 - RNA, 20 nt, Artificial Sequence
  HTT spacer sequence GTCN PAM
cuccaucaguaagggaccca

SEQ ID NO: 28209 - RNA, 20 nt, Artificial Sequence
  HTT spacer sequence GTCN PAM
cucuguguacuuguguacac

SEQ ID NO: 28210 - RNA, 20 nt, Artificial Sequence
  HTT spacer sequence GTCN PAM
cauccuucaaaacucacuag

SEQ ID NO: 28211 - RNA, 20 nt, Artificial Sequence
  HTT spacer sequence GTCN PAM
ggcuacaaauggcuuacacg

SEQ ID NO: 28212 - RNA, 20 nt, Artificial Sequence
  HTT spacer sequence GTCN PAM
gguugagauuuacuuuuuuc

SEQ ID NO: 28213 - RNA, 20 nt, Artificial Sequence
  HTT spacer sequence GTCN PAM
ugucgcuauggaguggcuuu

SEQ ID NO: 28214 - RNA, 20 nt, Artificial Sequence
  HTT spacer sequence GTCN PAM
cuauggaguggcuuuggacu

SEQ ID NO: 28215 - RNA, 20 nt, Artificial Sequence
  HTT spacer sequence GTCN PAM
aaagccacuccauagcgaca

SEQ ID NO: 28216 - RNA, 20 nt, Artificial Sequence
  HTT spacer sequence GTCN PAM
ggcccgcucuggagucugca

SEQ ID NO: 28217 - RNA, 20 nt, Artificial Sequence
  HTT spacer sequence GTCN PAM
ccauucauguuaugaaccaa

SEQ ID NO: 28218 - RNA, 20 nt, Artificial Sequence
  HTT spacer sequence GTCN PAM
aaggccaauuucugacgcua

SEQ ID NO: 28219 - RNA, 20 nt, Artificial Sequence
  HTT spacer sequence GTCN PAM
gaaauuggccuuggacacuc

SEQ ID NO: 28220 - RNA, 20 nt, Artificial Sequence
  HTT spacer sequence GTCN PAM
guagaacacuccagaaugua

SEQ ID NO: 28221 - RNA, 20 nt, Artificial Sequence
  HTT spacer sequence GTCN PAM
uggcagauggugucaguaga

SEQ ID NO: 28222 - RNA, 20 nt, Artificial Sequence
  HTT spacer sequence GTCN PAM
gcucuagaagcacacaggug

SEQ ID NO: 28223 - RNA, 20 nt, Artificial Sequence
  HTT spacer sequence GTCN PAM
gaggugaggcagcggggauu

SEQ ID NO: 28224 - RNA, 20 nt, Artificial Sequence
  HTT spacer sequence GTCN PAM
gggccaugguuggcagaggc

SEQ ID NO: 28225 - RNA, 20 nt, Artificial Sequence
  HTT spacer sequence GTCN PAM
ggagaagcaagacagggaug

SEQ ID NO: 28226 - RNA, 20 nt, Artificial Sequence
  HTT spacer sequence GTCN PAM
ugcuucuccugaccaucagu

SEQ ID NO: 28227 - RNA, 20 nt, Artificial Sequence
  HTT spacer sequence GTCN PAM
gcuccuccugcugugugcag

SEQ ID NO: 28228 - RNA, 20 nt, Artificial Sequence
  HTT spacer sequence GTCN PAM
gcagggcccggcaggaagga

SEQ ID NO: 28229 - RNA, 20 nt, Artificial Sequence
  HTT spacer sequence GTCN PAM
gggcuggucagcagggcccg

SEQ ID NO: 28230 - RNA, 20 nt, Artificial Sequence
  HTT spacer sequence GTCN PAM
gcagccggggcagccagcug

SEQ ID NO: 28231 - RNA, 20 nt, Artificial Sequence
  HTT spacer sequence GTCN PAM
caugagacaagugagauacc

SEQ ID NO: 28232 - RNA, 20 nt, Artificial Sequence
  HTT spacer sequence GTCN PAM
caugggacccugcaggcucc

SEQ ID NO: 28233 - RNA, 20 nt, Artificial Sequence
  HTT spacer sequence GTCN PAM
guuugcgcaagaagcaauau

SEQ ID NO: 28234 - RNA, 20 nt, Artificial Sequence
  HTT spacer sequence GTCN PAM
ggcucuccaucggccuucua

SEQ ID NO: 28235 - RNA, 20 nt, Artificial Sequence
  HTT spacer sequence GTCN PAM
ugagggugagggccacgccc

SEQ ID NO: 28236 - RNA, 20 nt, Artificial Sequence
  HTT spacer sequence GTCN PAM
ccugggccuggcugcuucug

SEQ ID NO: 28237 - RNA, 20 nt, Artificial Sequence
  HTT spacer sequence GTCN PAM
cccacagaagcagccaggcc

SEQ ID NO: 28238 - RNA, 20 nt, Artificial Sequence
  HTT spacer sequence GTCN PAM
uuuucaacacucccuccccu

SEQ ID NO: 28239 - RNA, 20 nt, Artificial Sequence
  HTT spacer sequence GTCN PAM
cacugucaccugggccuccu

SEQ ID NO: 28240 - RNA, 20 nt, Artificial Sequence
  HTT spacer sequence GTCN PAM
ccugggccuccugggccagc

SEQ ID NO: 28241 - RNA, 20 nt, Artificial Sequence
  HTT spacer sequence GTCN PAM
gcuggcccaggaggcccagg

SEQ ID NO: 28242 - RNA, 20 nt, Artificial Sequence
  HTT spacer sequence GTCN PAM
gcaaaguuccccaagaagga

SEQ ID NO: 28243 - RNA, 20 nt, Artificial Sequence
  HTT spacer sequence GTCN PAM
ccaggcugccgacauugcag

SEQ ID NO: 28244 - RNA, 20 nt, Artificial Sequence
  HTT spacer sequence GTCN PAM
gcagccuggggacagcccug

SEQ ID NO: 28245 - RNA, 20 nt, Artificial Sequence
  HTT spacer sequence GTCN PAM
aguccuaggcacacaccauu

SEQ ID NO: 28246 - RNA, 20 nt, Artificial Sequence
  HTT spacer sequence GTCN PAM
uaggcacacaccauugucac

SEQ ID NO: 28247 - RNA, 20 nt, Artificial Sequence
  HTT spacer sequence GTCN PAM
cuucaccaggcuccacgggg

SEQ ID NO: 28248 - RNA, 20 nt, Artificial Sequence
  HTT spacer sequence GTCN PAM
ccagaucuggggccccgugg

SEQ ID NO: 28249 - RNA, 20 nt, Artificial Sequence
  HTT spacer sequence GTCN PAM
agucaccggacucugcggac

SEQ ID NO: 28250 - RNA, 20 nt, Artificial Sequence
  HTT spacer sequence GTCN PAM
ccggacucugcggacacaga

SEQ ID NO: 28251 - RNA, 20 nt, Artificial Sequence
  HTT spacer sequence GTCN PAM
ggugacuggacaguccccag

SEQ ID NO: 28252 - RNA, 20 nt, Artificial Sequence
  HTT spacer sequence GTCN PAM
gcagaguccggugacuggac

SEQ ID NO: 28253 - RNA, 20 nt, Artificial Sequence
  HTT spacer sequence GTCN PAM
aaucugaccccauccugccu

SEQ ID NO: 28254 - RNA, 20 nt, Artificial Sequence
  HTT spacer sequence GTCN PAM
gauuugacucuguguccgca

SEQ ID NO: 28255 - RNA, 20 nt, Artificial Sequence
  HTT spacer sequence GTCN PAM
ggguacacugggccuguggg

SEQ ID NO: 28256 - RNA, 20 nt, Artificial Sequence
  HTT spacer sequence GTCN PAM
augaggagggcagggcagcc

SEQ ID NO: 28257 - RNA, 20 nt, Artificial Sequence
  HTT spacer sequence GTCN PAM
ugcucagcccuagacuggcu

SEQ ID NO: 28258 - RNA, 20 nt, Artificial Sequence
  HTT spacer sequence GTCN PAM
agggcugagcaagaccugag

SEQ ID NO: 28259 - RNA, 20 nt, Artificial Sequence
  HTT spacer sequence GTCN PAM
gagccagucuagggcugagc

SEQ ID NO: 28260 - RNA, 20 nt, Artificial Sequence
  HTT spacer sequence GTCN PAM
ggaccccacagcagcagggc

SEQ ID NO: 28261 - RNA, 20 nt, Artificial Sequence
  HTT spacer sequence GTCN PAM
ugaccucaccccaccacguu

SEQ ID NO: 28262 - RNA, 20 nt, Artificial Sequence
  HTT spacer sequence GTCN PAM
uccuggguggcccugcugcu

SEQ ID NO: 28263 - RNA, 20 nt, Artificial Sequence
  HTT spacer sequence GTCN PAM
caggcuguggcccauguacc

SEQ ID NO: 28264 - RNA, 20 nt, Artificial Sequence
  HTT spacer sequence GTCN PAM
ccaagucaggaggaaggagg

SEQ ID NO: 28265 - RNA, 20 nt, Artificial Sequence
  HTT spacer sequence GTCN PAM
ggaggaaggaggccaggagu

SEQ ID NO: 28266 - RNA, 20 nt, Artificial Sequence
  HTT spacer sequence GTCN PAM
uacugcucgggguccagguu

SEQ ID NO: 28267 - RNA, 20 nt, Artificial Sequence
  HTT spacer sequence GTCN PAM
agguucuggggcucuguccu

SEQ ID NO: 28268 - RNA, 20 nt, Artificial Sequence
  HTT spacer sequence GTCN PAM
ucugcgagcaccucucagcc

SEQ ID NO: 28269 - RNA, 20 nt, Artificial Sequence
  HTT spacer sequence GTCN PAM
gugcagcacuguggggaagg

SEQ ID NO: 28270 - RNA, 20 nt, Artificial Sequence
  HTT spacer sequence GTCN PAM
aacccugcggggaacuaagg

SEQ ID NO: 28271 - RNA, 20 nt, Artificial Sequence
  HTT spacer sequence GTCN PAM
ggagucuaacccugcgggga

SEQ ID NO: 28272 - RNA, 20 nt, Artificial Sequence
  HTT spacer sequence GTCN PAM
ggaguccggccucccccaac

SEQ ID NO: 28273 - RNA, 20 nt, Artificial Sequence
  HTT spacer sequence GTCN PAM
ggccucccccaacagcccac

SEQ ID NO: 28274 - RNA, 20 nt, Artificial Sequence
  HTT spacer sequence GTCN PAM
gccccgugguugaauccaaa

SEQ ID NO: 28275 - RNA, 20 nt, Artificial Sequence
  HTT spacer sequence GTCN PAM
uuuccuguucaaagaacuuu

SEQ ID NO: 28276 - RNA, 20 nt, Artificial Sequence
  HTT spacer sequence GTCN PAM
cuugaaaguucuuugaacag

SEQ ID NO: 28277 - RNA, 20 nt, Artificial Sequence
  HTT spacer sequence GTCN PAM
cuguaauuuaaugauaauug

SEQ ID NO: 28278 - RNA, 20 nt, Artificial Sequence
  HTT spacer sequence GTCN PAM
cauuuucucccuuacaggca

SEQ ID NO: 28279 - RNA, 20 nt, Artificial Sequence
  HTT spacer sequence GTCN PAM
uggucagguggaggagaccu

SEQ ID NO: 28280 - RNA, 20 nt, Artificial Sequence
  HTT spacer sequence GTCN PAM
gguggaggagaccugugucc

SEQ ID NO: 28281 - RNA, 20 nt, Artificial Sequence
  HTT spacer sequence GTCN PAM
ccuccaccugaccaggacgg

SEQ ID NO: 28282 - RNA, 20 nt, Artificial Sequence
  HTT spacer sequence GTCN PAM
uggacuuuggaccccgaggc

SEQ ID NO: 28283 - RNA, 20 nt, Artificial Sequence
  HTT spacer sequence GTCN PAM
aggacacaggucuccuccac

SEQ ID NO: 28284 - RNA, 20 nt, Artificial Sequence
  HTT spacer sequence GTCN PAM
aaaguccaggacacaggucu

SEQ ID NO: 28285 - RNA, 20 nt, Artificial Sequence
  HTT spacer sequence GTCN PAM
accugccccacagccacagc

SEQ ID NO: 28286 - RNA, 20 nt, Artificial Sequence
  HTT spacer sequence GTCN PAM
cacuugauaagaacugacau

SEQ ID NO: 28287 - RNA, 20 nt, Artificial Sequence
  HTT spacer sequence GTCN PAM
uuauucacacacagauaaga

SEQ ID NO: 28288 - RNA, 20 nt, Artificial Sequence
  HTT spacer sequence GTCN PAM
uuuauuucucuuucuugccu

SEQ ID NO: 28289 - RNA, 20 nt, Artificial Sequence
  HTT spacer sequence GTCN PAM
guguucaugagggucauugg

SEQ ID NO: 28290 - RNA, 20 nt, Artificial Sequence
  HTT spacer sequence GTCN PAM
uugggcuguaauuucuuuuu

SEQ ID NO: 28291 - RNA, 20 nt, Artificial Sequence
  HTT spacer sequence GTCN PAM
uugucagguuuugauaucag

SEQ ID NO: 28292 - RNA, 20 nt, Artificial Sequence
  HTT spacer sequence GTCN PAM
gguuuugauaucagaguuac

SEQ ID NO: 28293 - RNA, 20 nt, Artificial Sequence
  HTT spacer sequence GTCN PAM
uucccuuccuucuauuuacu

SEQ ID NO: 28294 - RNA, 20 nt, Artificial Sequence
  HTT spacer sequence GTCN PAM
aacaagauaucacaaagaaa

SEQ ID NO: 28295 - RNA, 20 nt, Artificial Sequence
  HTT spacer sequence GTCN PAM
uuuagcauuuaaugagauuu

SEQ ID NO: 28296 - RNA, 20 nt, Artificial Sequence
  HTT spacer sequence GTCN PAM
ucuauauguguuaauuaggu

SEQ ID NO: 28297 - RNA, 20 nt, Artificial Sequence
  HTT spacer sequence GTCN PAM
gguuuucccaacaauuuaua

SEQ ID NO: 28298 - RNA, 20 nt, Artificial Sequence
  HTT spacer sequence GTCN PAM
uuuuuggcuugacuuucuuu

SEQ ID NO: 28299 - RNA, 20 nt, Artificial Sequence
  HTT spacer sequence GTCN PAM
agccaaaaaugacacuauca

SEQ ID NO: 28300 - RNA, 20 nt, Artificial Sequence
  HTT spacer sequence GTCN PAM
acuugucuuguuuuucuuca

SEQ ID NO: 28301 - RNA, 20 nt, Artificial Sequence
  HTT spacer sequence GTCN PAM
uguuuuucuucauauuucua

SEQ ID NO: 28302 - RNA, 20 nt, Artificial Sequence
  HTT spacer sequence GTCN PAM
cuacaggaucgcguggcagu

SEQ ID NO: 28303 - RNA, 20 nt, Artificial Sequence
  HTT spacer sequence GTCN PAM
aggggaggcuguggaggcug

SEQ ID NO: 28304 - RNA, 20 nt, Artificial Sequence
  HTT spacer sequence GTCN PAM
caucuuugggaagaugcaga

SEQ ID NO: 28305 - RNA, 20 nt, Artificial Sequence
  HTT spacer sequence GTCN PAM
agaugucccaucuuugggaa

SEQ ID NO: 28306 - RNA, 20 nt, Artificial Sequence
  HTT spacer sequence GTCN PAM
aauaugauacacauugaguc

SEQ ID NO: 28307 - RNA, 20 nt, Artificial Sequence
  HTT spacer sequence GTCN PAM
acuaaaugcuguuaaagcaa

SEQ ID NO: 28308 - RNA, 20 nt, Artificial Sequence
  HTT spacer sequence GTCN PAM
accuucuuuucuuuccuuuu

SEQ ID NO: 28309 - RNA, 20 nt, Artificial Sequence
  HTT spacer sequence GTCN PAM
acuacaaagaccucauguaa

SEQ ID NO: 28310 - RNA, 20 nt, Artificial Sequence
  HTT spacer sequence GTCN PAM
uuguaguagacaaaagccau

SEQ ID NO: 28311 - RNA, 20 nt, Artificial Sequence
  HTT spacer sequence GTCN PAM
uggaacuccuacccucaagu

SEQ ID NO: 28312 - RNA, 20 nt, Artificial Sequence
  HTT spacer sequence GTCN PAM
cccccacgaugggcagcagc

SEQ ID NO: 28313 - RNA, 20 nt, Artificial Sequence
  HTT spacer sequence GTCN PAM
agugaaaauacguuucucuu

SEQ ID NO: 28314 - RNA, 20 nt, Artificial Sequence
  HTT spacer sequence GTCN PAM
gaagcaucuggauaaaaaug

SEQ ID NO: 28315 - RNA, 20 nt, Artificial Sequence
  HTT spacer sequence GTCN PAM
gccacaugauggugcccaca

SEQ ID NO: 28316 - RNA, 20 nt, Artificial Sequence
  HTT spacer sequence GTCN PAM
ccuuuauuucuucaaccauu

SEQ ID NO: 28317 - RNA, 20 nt, Artificial Sequence
  HTT spacer sequence GTCN PAM
uuguuucuggcuauuuucaa

SEQ ID NO: 28318 - RNA, 20 nt, Artificial Sequence
  HTT spacer sequence GTCN PAM
gccaaaauaugcaucauugu

SEQ ID NO: 28319 - RNA, 20 nt, Artificial Sequence
  HTT spacer sequence GTCN PAM
gaggacaauaaaaugacaac

SEQ ID NO: 28320 - RNA, 20 nt, Artificial Sequence
  HTT spacer sequence GTCN PAM
ucugaccacuauuauuucug

SEQ ID NO: 28321 - RNA, 20 nt, Artificial Sequence
  HTT spacer sequence GTCN PAM
uuuuauuguccucugaccac

SEQ ID NO: 28322 - RNA, 20 nt, Artificial Sequence
  HTT spacer sequence GTCN PAM
caaaaaaauaauaauaaaac

SEQ ID NO: 28323 - RNA, 20 nt, Artificial Sequence
  HTT spacer sequence GTCN PAM
gauagcccuucguucccuga

SEQ ID NO: 28324 - RNA, 20 nt, Artificial Sequence
  HTT spacer sequence GTCN PAM
cccagcggggcgguggggua

SEQ ID NO: 28325 - RNA, 20 nt, Artificial Sequence
  HTT spacer sequence GTCN PAM
gggaaguugaggcugcagug

SEQ ID NO: 28326 - RNA, 20 nt, Artificial Sequence
  HTT spacer sequence GTCN PAM
ugcccuguugcccaggcuag

SEQ ID NO: 28327 - RNA, 20 nt, Artificial Sequence
  HTT spacer sequence GTCN PAM
acuuaauuaaugcauauuuu

SEQ ID NO: 28328 - RNA, 20 nt, Artificial Sequence
  HTT spacer sequence GTCN PAM
ccaaauaaaauaugcauuaa

SEQ ID NO: 28329 - RNA, 20 nt, Artificial Sequence
  HTT spacer sequence GTCN PAM
cuaauugccaugagcucuac

SEQ ID NO: 28330 - RNA, 20 nt, Artificial Sequence
  HTT spacer sequence GTCN PAM
cuaccaaaaacacaaaaaau

SEQ ID NO: 28331 - RNA, 20 nt, Artificial Sequence
  HTT spacer sequence GTCN PAM
ccaacuccugagcuuaagug

SEQ ID NO: 28332 - RNA, 20 nt, Artificial Sequence
  HTT spacer sequence GTCN PAM
cugcccuggagccucaggag

SEQ ID NO: 28333 - RNA, 20 nt, Artificial Sequence
  HTT spacer sequence GTCN PAM
ccuaggcuggagugcagugg

SEQ ID NO: 28334 - RNA, 20 nt, Artificial Sequence
  HTT spacer sequence GTCN PAM
cccugccccuuccuuccugc

SEQ ID NO: 28335 - RNA, 20 nt, Artificial Sequence
  HTT spacer sequence GTCN PAM
uccuuccccggcgcuggguc

SEQ ID NO: 28336 - RNA, 20 nt, Artificial Sequence
  HTT spacer sequence GTCN PAM
ccgccccuccuccggccucg

SEQ ID NO: 28337 - RNA, 20 nt, Artificial Sequence
  HTT spacer sequence GTCN PAM
aggcgagggcggggccgagg

SEQ ID NO: 28338 - RNA, 20 nt, Artificial Sequence
  HTT spacer sequence GTCN PAM
ccucggcagccaccgccccc

SEQ ID NO: 28339 - RNA, 20 nt, Artificial Sequence
  HTT spacer sequence GTCN PAM
gacuccacgagcggccgcuu

SEQ ID NO: 28340 - RNA, 20 nt, Artificial Sequence
  HTT spacer sequence GTCN PAM
gacgagggaacccucccagc

SEQ ID NO: 28341 - RNA, 20 nt, Artificial Sequence
  HTT spacer sequence GTCN PAM
cggaaggcagcuucugcccu

SEQ ID NO: 28342 - RNA, 20 nt, Artificial Sequence
  HTT spacer sequence GTCN PAM
acacuccacggcucugggcc

SEQ ID NO: 28343 - RNA, 20 nt, Artificial Sequence
  HTT spacer sequence GTCN PAM
acacuagauggcucugggcc

SEQ ID NO: 28344 - RNA, 20 nt, Artificial Sequence
  HTT spacer sequence GTCN PAM
ccucucugucuacacuagau

SEQ ID NO: 28345 - RNA, 20 nt, Artificial Sequence
  HTT spacer sequence GTCN PAM
acacuccacagcuauggguc

SEQ ID NO: 28346 - RNA, 20 nt, Artificial Sequence
  HTT spacer sequence GTCN PAM
cuugcugggaaugugucccu

SEQ ID NO: 28347 - RNA, 20 nt, Artificial Sequence
  HTT spacer sequence GTCN PAM
cugggcaggugaccaccuuc

SEQ ID NO: 28348 - RNA, 20 nt, Artificial Sequence
  HTT spacer sequence GTCN PAM
ccugcccagggacacauucc

SEQ ID NO: 28349 - RNA, 20 nt, Artificial Sequence
  HTT spacer sequence GTCN PAM
aucguggccagugcuuuugg

SEQ ID NO: 28350 - RNA, 20 nt, Artificial Sequence
  HTT spacer sequence GTCN PAM
ccaaaagcacuggccacgau

SEQ ID NO: 28351 - RNA, 20 nt, Artificial Sequence
  HTT spacer sequence GTCN PAM
gggucuuuuucuuaaaacug

SEQ ID NO: 28352 - RNA, 20 nt, Artificial Sequence
  HTT spacer sequence GTCN PAM
uuuucuuaaaacugcaaguc

SEQ ID NO: 28353 - RNA, 20 nt, Artificial Sequence
  HTT spacer sequence GTCN PAM
cagaggcauccgcaucauug

SEQ ID NO: 28354 - RNA, 20 nt, Artificial Sequence
  HTT spacer sequence GTCN PAM
cuccucccucugcucugcca

SEQ ID NO: 28355 - RNA, 20 nt, Artificial Sequence
  HTT spacer sequence GTCN PAM
ccacugcccugucgcuccuc

SEQ ID NO: 28356 - RNA, 20 nt, Artificial Sequence
  HTT spacer sequence GTCN PAM
cagggagguugacaaagaca

SEQ ID NO: 28357 - RNA, 20 nt, Artificial Sequence
  HTT spacer sequence GTCN PAM
accucccugagaccuccggu

SEQ ID NO: 28358 - RNA, 20 nt, Artificial Sequence
  HTT spacer sequence GTCN PAM
uugucaaccucccugagacc

SEQ ID NO: 28359 - RNA, 20 nt, Artificial Sequence
  HTT spacer sequence GTCN PAM
agggcuggcucccuuucugc

SEQ ID NO: 28360 - RNA, 20 nt, Artificial Sequence
  HTT spacer sequence GTCN PAM
cggggaagaagggguggcca

SEQ ID NO: 28361 - RNA, 20 nt, Artificial Sequence
  HTT spacer sequence GTCN PAM
gggcuuuaggauuuugugug

SEQ ID NO: 28362 - RNA, 20 nt, Artificial Sequence
  HTT spacer sequence GTCN PAM
uugauuuagaaaacaucuuu

SEQ ID NO: 28363 - RNA, 20 nt, Artificial Sequence
  HTT spacer sequence GTCN PAM
aaaauuuuauacccagcuaa

SEQ ID NO: 28364 - RNA, 20 nt, Artificial Sequence
  HTT spacer sequence GTCN PAM
cuuaaaaaaaaaauugaaca

SEQ ID NO: 28365 - RNA, 20 nt, Artificial Sequence
  HTT spacer sequence GTCN PAM
cacucuuuugcccaggcugg

SEQ ID NO: 28366 - RNA, 20 nt, Artificial Sequence
  HTT spacer sequence GTCN PAM
uagcucgcugcagccccaaa

SEQ ID NO: 28367 - RNA, 20 nt, Artificial Sequence
  HTT spacer sequence GTCN PAM
ugugucugguuggaacuuga

SEQ ID NO: 28368 - RNA, 20 nt, Artificial Sequence
  HTT spacer sequence GTCN PAM
gguuggaacuugauuuagca

SEQ ID NO: 28369 - RNA, 20 nt, Artificial Sequence
  HTT spacer sequence GTCN PAM
auuuacggacagagcugccg

SEQ ID NO: 28370 - RNA, 20 nt, Artificial Sequence
  HTT spacer sequence GTCN PAM
guaaauugacaguucccaca

SEQ ID NO: 28371 - RNA, 20 nt, Artificial Sequence
  HTT spacer sequence GTCN PAM
aggcaggugcaguggggcaa

SEQ ID NO: 28372 - RNA, 20 nt, Artificial Sequence
  HTT spacer sequence GTCN PAM
caagggcacagcgcuucagg

SEQ ID NO: 28373 - RNA, 20 nt, Artificial Sequence
  HTT spacer sequence GTCN PAM
uggcugcccuccucuguaac

SEQ ID NO: 28374 - RNA, 20 nt, Artificial Sequence
  HTT spacer sequence GTCN PAM
gucccggcugcccuccucug

SEQ ID NO: 28375 - RNA, 20 nt, Artificial Sequence
  HTT spacer sequence GTCN PAM
cggcugcccuccucuguaac

SEQ ID NO: 28376 - RNA, 20 nt, Artificial Sequence
  HTT spacer sequence GTCN PAM
guccccggcugcccuccucu

SEQ ID NO: 28377 - RNA, 20 nt, Artificial Sequence
  HTT spacer sequence GTCN PAM
ccggcugcccuccucuguaa

SEQ ID NO: 28378 - RNA, 20 nt, Artificial Sequence
  HTT spacer sequence GTCN PAM
cacucugcacagauuuaaaa

SEQ ID NO: 28379 - RNA, 20 nt, Artificial Sequence
  HTT spacer sequence GTCN PAM
aauacaaauggaaaggaaga

SEQ ID NO: 28380 - RNA, 20 nt, Artificial Sequence
  HTT spacer sequence GTCN PAM
cuccccaaaccucaacaucc

SEQ ID NO: 28381 - RNA, 20 nt, Artificial Sequence
  HTT spacer sequence GTCN PAM
agccucuugaggcucucuca

SEQ ID NO: 28382 - RNA, 20 nt, Artificial Sequence
  HTT spacer sequence GTCN PAM
cacuggguccagccucuuga

SEQ ID NO: 28383 - RNA, 20 nt, Artificial Sequence
  HTT spacer sequence GTCN PAM
agcaggagguguggccacca

SEQ ID NO: 28384 - RNA, 20 nt, Artificial Sequence
  HTT spacer sequence GTCN PAM
ccguaccgaggcucaccuug

SEQ ID NO: 28385 - RNA, 20 nt, Artificial Sequence
  HTT spacer sequence GTCN PAM
ucuaacagcgauauuagcga

SEQ ID NO: 28386 - RNA, 20 nt, Artificial Sequence
  HTT spacer sequence GTCN PAM
cuggccaacagccagcaggg

SEQ ID NO: 28387 - RNA, 20 nt, Artificial Sequence
  HTT spacer sequence GTCN PAM
cgugggcggcuuccuugggc

SEQ ID NO: 28388 - RNA, 20 nt, Artificial Sequence
  HTT spacer sequence GTCN PAM
gggagugacgguggauucca

SEQ ID NO: 28389 - RNA, 20 nt, Artificial Sequence
  HTT spacer sequence GTCN PAM
cucccugaccccaaacccca

SEQ ID NO: 28390 - RNA, 20 nt, Artificial Sequence
  HTT spacer sequence GTCN PAM
uccuuggaaccugugguugc

SEQ ID NO: 28391 - RNA, 20 nt, Artificial Sequence
  HTT spacer sequence GTCN PAM
ucacaacacaaucacuuacu

SEQ ID NO: 28392 - RNA, 20 nt, Artificial Sequence
  HTT spacer sequence GTCN PAM
ugcagaagagacuacacagc

SEQ ID NO: 28393 - RNA, 20 nt, Artificial Sequence
  HTT spacer sequence GTCN PAM
cuucugcaagacucuuuaaa

SEQ ID NO: 28394 - RNA, 20 nt, Artificial Sequence
  HTT spacer sequence GTCN PAM
cgggccugcuguguagucuc

SEQ ID NO: 28395 - RNA, 20 nt, Artificial Sequence
  HTT spacer sequence GTCN PAM
cauuguucccuuggagccau

SEQ ID NO: 28396 - RNA, 20 nt, Artificial Sequence
  HTT spacer sequence GTCN PAM
uggaagcucaucagaauguu

SEQ ID NO: 28397 - RNA, 20 nt, Artificial Sequence
  HTT spacer sequence GTCN PAM
cccccaagggugcggagugu

SEQ ID NO: 28398 - RNA, 20 nt, Artificial Sequence
  HTT spacer sequence GTCN PAM
cgaaagcgugaauccguagc

SEQ ID NO: 28399 - RNA, 20 nt, Artificial Sequence
  HTT spacer sequence GTCN PAM
ugagagggagcccugcggau

SEQ ID NO: 28400 - RNA, 20 nt, Artificial Sequence
  HTT spacer sequence GTCN PAM
ccagcucggaggcccacgaa

SEQ ID NO: 28401 - RNA, 20 nt, Artificial Sequence
  HTT spacer sequence GTCN PAM
augaaaucaacgugaaaaaa

SEQ ID NO: 28402 - RNA, 20 nt, Artificial Sequence
  HTT spacer sequence GTCN PAM
uucacauggugauugcugaa

SEQ ID NO: 28403 - RNA, 20 nt, Artificial Sequence
  HTT spacer sequence GTCN PAM
gccgcuucgaauccuguucc

SEQ ID NO: 28404 - RNA, 20 nt, Artificial Sequence
  HTT spacer sequence GTCN PAM
cccuucuucaucacuggaac

SEQ ID NO: 28405 - RNA, 20 nt, Artificial Sequence
  HTT spacer sequence GTCN PAM
uggaggaaaugcagucuggu

SEQ ID NO: 28406 - RNA, 20 nt, Artificial Sequence
  HTT spacer sequence GTCN PAM
gguggaauuuucaauaugau

SEQ ID NO: 28407 - RNA, 20 nt, Artificial Sequence
  HTT spacer sequence GTCN PAM
gccgcaacucgauuugaugu

SEQ ID NO: 28408 - RNA, 20 nt, Artificial Sequence
  HTT spacer sequence GTCN PAM
aacaucaaaucgaguugcgg

SEQ ID NO: 28409 - RNA, 20 nt, Artificial Sequence
  HTT spacer sequence GTCN PAM
aaugcugaaaaccgaaucau

SEQ ID NO: 28410 - RNA, 20 nt, Artificial Sequence
  HTT spacer sequence GTCN PAM
ugacgauuuugcauuggaug

SEQ ID NO: 28411 - RNA, 20 nt, Artificial Sequence
  HTT spacer sequence GTCN PAM
ugacuuucuaguccaaugcu

SEQ ID NO: 28412 - RNA, 20 nt, Artificial Sequence
  HTT spacer sequence GTCN PAM
gacagcuugcaagccauccg

SEQ ID NO: 28413 - RNA, 20 nt, Artificial Sequence
  HTT spacer sequence GTCN PAM
gacuccagguuggagcucgu

SEQ ID NO: 28414 - RNA, 20 nt, Artificial Sequence
  HTT spacer sequence GTCN PAM
ccagcgaguggauuuucugc

SEQ ID NO: 28415 - RNA, 20 nt, Artificial Sequence
  HTT spacer sequence GTCN PAM
ugcaugaucuucauggucac

SEQ ID NO: 28416 - RNA, 20 nt, Artificial Sequence
  HTT spacer sequence GTCN PAM
gugcucagcugcacacaguc

SEQ ID NO: 28417 - RNA, 20 nt, Artificial Sequence
  HTT spacer sequence GTCN PAM
uggccgaguacccggccgag

SEQ ID NO: 28418 - RNA, 20 nt, Artificial Sequence
  HTT spacer sequence GTCN PAM
gggcacacggcgcugaaggc

SEQ ID NO: 28419 - RNA, 20 nt, Artificial Sequence
  HTT spacer sequence GTCN PAM
uccgggcacacggcgcugaa

SEQ ID NO: 28420 - RNA, 20 nt, Artificial Sequence
  HTT spacer sequence GTCN PAM
gcaugguaaccaacccgaaa

SEQ ID NO: 28421 - RNA, 20 nt, Artificial Sequence
  HTT spacer sequence GTCN PAM
uucgucugcaugguaaccaa

SEQ ID NO: 28422 - RNA, 20 nt, Artificial Sequence
  HTT spacer sequence GTCN PAM
ucauucgucugcaugguaac

SEQ ID NO: 28423 - RNA, 20 nt, Artificial Sequence
  HTT spacer sequence GTCN PAM
gcagggcgcccuccuccucc

SEQ ID NO: 28424 - RNA, 20 nt, Artificial Sequence
  HTT spacer sequence GTCN PAM
accaugaacacguggcagga

SEQ ID NO: 28425 - RNA, 20 nt, Artificial Sequence
  HTT spacer sequence GTCN PAM
ggguccaccaugaacacgug

SEQ ID NO: 28426 - RNA, 20 nt, Artificial Sequence
  HTT spacer sequence GTCN PAM
gccgugcacucaaacccaaa

SEQ ID NO: 28427 - RNA, 20 nt, Artificial Sequence
  HTT spacer sequence GTCN PAM
gggucggccgugcacucaaa

SEQ ID NO: 28428 - RNA, 20 nt, Artificial Sequence
  HTT spacer sequence GTCN PAM
ggaauucccggcguccuccc

SEQ ID NO: 28429 - RNA, 20 nt, Artificial Sequence
  HTT spacer sequence GTCN PAM
ucccuccccguccugcaguu

SEQ ID NO: 28430 - RNA, 20 nt, Artificial Sequence
  HTT spacer sequence GTCN PAM
ugcaguucaucucuguccug

SEQ ID NO: 28431 - RNA, 20 nt, Artificial Sequence
  HTT spacer sequence GTCN PAM
uguaccgagacaugggugag

SEQ ID NO: 28432 - RNA, 20 nt, Artificial Sequence
  HTT spacer sequence GTCN PAM
cgguacaggacagagaugaa

SEQ ID NO: 28433 - RNA, 20 nt, Artificial Sequence
  HTT spacer sequence GTCN PAM
agaaaggcgcgggcccgcau

SEQ ID NO: 28434 - RNA, 20 nt, Artificial Sequence
  HTT spacer sequence GTCN PAM
ccguccagaaaggcgcgggc

SEQ ID NO: 28435 - RNA, 20 nt, Artificial Sequence
  HTT spacer sequence GTCN PAM
cuguugcugcuggugcuguu

SEQ ID NO: 28436 - RNA, 20 nt, Artificial Sequence
  HTT spacer sequence GTCN PAM
uugugguggaccuggguggg

SEQ ID NO: 28437 - RNA, 20 nt, Artificial Sequence
  HTT spacer sequence GTCN PAM
accacaaggacccgguugcu

SEQ ID NO: 28438 - RNA, 20 nt, Artificial Sequence
  HTT spacer sequence GTCN PAM
gcucgagcucccacccaggu

SEQ ID NO: 28439 - RNA, 20 nt, Artificial Sequence
  HTT spacer sequence GTCN PAM
cacgcgcugccuccggggcc

SEQ ID NO: 28440 - RNA, 20 nt, Artificial Sequence
  HTT spacer sequence GTCN PAM
agggagcaccccagggcugg

SEQ ID NO: 28441 - RNA, 20 nt, Artificial Sequence
  HTT spacer sequence GTCN PAM
ggaccccgaagggagccccc

SEQ ID NO: 28442 - RNA, 20 nt, Artificial Sequence
  HTT spacer sequence GTCN PAM
ggacagaagggcccagucca

SEQ ID NO: 28443 - RNA, 20 nt, Artificial Sequence
  HTT spacer sequence GTCN PAM
gaugagcggccucaaauggg

SEQ ID NO: 28444 - RNA, 20 nt, Artificial Sequence
  HTT spacer sequence GTCN PAM
gucugaugagcggccucaaa

SEQ ID NO: 28445 - RNA, 20 nt, Artificial Sequence
  HTT spacer sequence GTCN PAM
cagaaccugucagucugaug

SEQ ID NO: 28446 - RNA, 20 nt, Artificial Sequence
  HTT spacer sequence GTCN PAM
ccccuuccaagaggggcacc

SEQ ID NO: 28447 - RNA, 20 nt, Artificial Sequence
  HTT spacer sequence GTCN PAM
acgugcuccgggaguggcag

SEQ ID NO: 28448 - RNA, 20 nt, Artificial Sequence
  HTT spacer sequence GTCN PAM
gcacugccacucccggagca

SEQ ID NO: 28449 - RNA, 20 nt, Artificial Sequence
  HTT spacer sequence GTCN PAM
cugguguguccgcacugcca

SEQ ID NO: 28450 - RNA, 20 nt, Artificial Sequence
  HTT spacer sequence GTCN PAM
uggucgcugguguguccgca

SEQ ID NO: 28451 - RNA, 20 nt, Artificial Sequence
  HTT spacer sequence GTCN PAM
agcaucaacugcggcacacu

SEQ ID NO: 28452 - RNA, 20 nt, Artificial Sequence
  HTT spacer sequence GTCN PAM
gcggggaucuugcucauagg

SEQ ID NO: 28453 - RNA, 20 nt, Artificial Sequence
  HTT spacer sequence GTCN PAM
aggaaggccuuuggaaugca

SEQ ID NO: 28454 - RNA, 20 nt, Artificial Sequence
  HTT spacer sequence GTCN PAM
ccaucgaaauguucgaaaga

SEQ ID NO: 28455 - RNA, 20 nt, Artificial Sequence
  HTT spacer sequence GTCN PAM
uucgaacauuucgaugggga

SEQ ID NO: 28456 - RNA, 20 nt, Artificial Sequence
  HTT spacer sequence GTCN PAM
agcaggaggcggugcugcca

SEQ ID NO: 28457 - RNA, 20 nt, Artificial Sequence
  HTT spacer sequence GTCN PAM
uuccagaggguucccugcac

SEQ ID NO: 28458 - RNA, 20 nt, Artificial Sequence
  HTT spacer sequence GTCN PAM
uuacaucguaaacagccgga

SEQ ID NO: 28459 - RNA, 20 nt, Artificial Sequence
  HTT spacer sequence GTCN PAM
caggaugugaacaaacacua

SEQ ID NO: 28460 - RNA, 20 nt, Artificial Sequence
  HTT spacer sequence GTCN PAM
ucuuaggauggucucaggau

SEQ ID NO: 28461 - RNA, 20 nt, Artificial Sequence
  HTT spacer sequence GTCN PAM
gaucccauagccuccccagu

SEQ ID NO: 28462 - RNA, 20 nt, Artificial Sequence
  HTT spacer sequence GTCN PAM
ugaggcggccacaagauggg

SEQ ID NO: 28463 - RNA, 20 nt, Artificial Sequence
  HTT spacer sequence GTCN PAM
ggacgucgccguggacaggu

SEQ ID NO: 28464 - RNA, 20 nt, Artificial Sequence
  HTT spacer sequence GTCN PAM
ggacccaucuuguggccgcc

SEQ ID NO: 28465 - RNA, 20 nt, Artificial Sequence
  HTT spacer sequence GTCN PAM
ccguggacaggucugcagag

SEQ ID NO: 28466 - RNA, 20 nt, Artificial Sequence
  HTT spacer sequence GTCN PAM
gcuucucccuccucugggga

SEQ ID NO: 28467 - RNA, 20 nt, Artificial Sequence
  HTT spacer sequence GTCN PAM
acaaguaacucagcuccccu

SEQ ID NO: 28468 - RNA, 20 nt, Artificial Sequence
  HTT spacer sequence GTCN PAM
ccaguugauggcaaccuuag

SEQ ID NO: 28469 - RNA, 20 nt, Artificial Sequence
  HTT spacer sequence GTCN PAM
aagguugccaucaacugggg

SEQ ID NO: 28470 - RNA, 20 nt, Artificial Sequence
  HTT spacer sequence GTCN PAM
cagagcuagcuuucccagcg

SEQ ID NO: 28471 - RNA, 20 nt, Artificial Sequence
  HTT spacer sequence GTCN PAM
uaucuguugucgugggucuu

SEQ ID NO: 28472 - RNA, 20 nt, Artificial Sequence
  HTT spacer sequence GTCN PAM
ugggucuugauagcuuccac

SEQ ID NO: 28473 - RNA, 20 nt, Artificial Sequence
  HTT spacer sequence GTCN PAM
ugauagcuuccaccagcuua

SEQ ID NO: 28474 - RNA, 20 nt, Artificial Sequence
  HTT spacer sequence GTCN PAM
uccaaguuaaccugugugaa

SEQ ID NO: 28475 - RNA, 20 nt, Artificial Sequence
  HTT spacer sequence GTCN PAM
ccuucacacagguuaacuug

SEQ ID NO: 28476 - RNA, 20 nt, Artificial Sequence
  HTT spacer sequence GTCN PAM
gcuccacugucgccuucaca

SEQ ID NO: 28477 - RNA, 20 nt, Artificial Sequence
  HTT spacer sequence GTCN PAM
ugcgggcuugacgcccucgu

SEQ ID NO: 28478 - RNA, 20 nt, Artificial Sequence
  HTT spacer sequence GTCN PAM
agcccgcaggaccaacgagu

SEQ ID NO: 28479 - RNA, 20 nt, Artificial Sequence
  HTT spacer sequence GTCN PAM
ggccuucccuugacagugcg

SEQ ID NO: 28480 - RNA, 20 nt, Artificial Sequence
  HTT spacer sequence GTCN PAM
agggaaggccugacgagggc

SEQ ID NO: 28481 - RNA, 20 nt, Artificial Sequence
  HTT spacer sequence GTCN PAM
ggaacccccaucucaggacg

SEQ ID NO: 28482 - RNA, 20 nt, Artificial Sequence
  HTT spacer sequence GTCN PAM
ugagauggggguucccgacc

SEQ ID NO: 28483 - RNA, 20 nt, Artificial Sequence
  HTT spacer sequence GTCN PAM
uccugccugccugcguccug

SEQ ID NO: 28484 - RNA, 20 nt, Artificial Sequence
  HTT spacer sequence GTCN PAM
cgugcgaucaccacccgcug

SEQ ID NO: 28485 - RNA, 20 nt, Artificial Sequence
  HTT spacer sequence GTCN PAM
caaccuugguggagaacgag

SEQ ID NO: 28486 - RNA, 20 nt, Artificial Sequence
  HTT spacer sequence GTCN PAM
uuccagcagggguugauacu

SEQ ID NO: 28487 - RNA, 20 nt, Artificial Sequence
  HTT spacer sequence GTCN PAM
aucucuuaguggggaugucc

SEQ ID NO: 28488 - RNA, 20 nt, Artificial Sequence
  HTT spacer sequence GTCN PAM
ccugugccagugcugucuuu

SEQ ID NO: 28489 - RNA, 20 nt, Artificial Sequence
  HTT spacer sequence GTCN PAM
uuuaguccaggccaacaguc

SEQ ID NO: 28490 - RNA, 20 nt, Artificial Sequence
  HTT spacer sequence GTCN PAM
aggccaacagucucugcuuc

SEQ ID NO: 28491 - RNA, 20 nt, Artificial Sequence
  HTT spacer sequence GTCN PAM
cugcuucuucucuugcuugu

SEQ ID NO: 28492 - RNA, 20 nt, Artificial Sequence
  HTT spacer sequence GTCN PAM
cugguugguacugugggcca

SEQ ID NO: 28493 - RNA, 20 nt, Artificial Sequence
  HTT spacer sequence GTCN PAM
aucacaggaggugcuuucag

SEQ ID NO: 28494 - RNA, 20 nt, Artificial Sequence
  HTT spacer sequence GTCN PAM
agggcccugcuguaucaggc

SEQ ID NO: 28495 - RNA, 20 nt, Artificial Sequence
  HTT spacer sequence GTCN PAM
cuguaauggcuggacguccu

SEQ ID NO: 28496 - RNA, 20 nt, Artificial Sequence
  HTT spacer sequence GTCN PAM
agccauuacagggaccuugc

SEQ ID NO: 28497 - RNA, 20 nt, Artificial Sequence
  HTT spacer sequence GTCN PAM
uguccacugcagaaauucuu

SEQ ID NO: 28498 - RNA, 20 nt, Artificial Sequence
  HTT spacer sequence GTCN PAM
acugcagaaauucuuagggc

SEQ ID NO: 28499 - RNA, 20 nt, Artificial Sequence
  HTT spacer sequence GTCN PAM
gaggaaagcccuaagaauuu

SEQ ID NO: 28500 - RNA, 20 nt, Artificial Sequence
  HTT spacer sequence GTCN PAM
aucuucuuggccaucugcug

SEQ ID NO: 28501 - RNA, 20 nt, Artificial Sequence
  HTT spacer sequence GTCN PAM
aauagagagugggaauuuuc

SEQ ID NO: 28502 - RNA, 20 nt, Artificial Sequence
  HTT spacer sequence GTCN PAM
guuugcuaguauuuuguuga

SEQ ID NO: 28503 - RNA, 20 nt, Artificial Sequence
  HTT spacer sequence GTCN PAM
uagccagagcagucaggcaa

SEQ ID NO: 28504 - RNA, 20 nt, Artificial Sequence
  HTT spacer sequence GTCN PAM
ggcaagaggaauaaauaaaa

SEQ ID NO: 28505 - RNA, 20 nt, Artificial Sequence
  HTT spacer sequence GTCN PAM
aauuaucgugguuugcugau

SEQ ID NO: 28506 - RNA, 20 nt, Artificial Sequence
  HTT spacer sequence GTCN PAM
cccaggcuggagcacagugc

SEQ ID NO: 28507 - RNA, 20 nt, Artificial Sequence
  HTT spacer sequence GTCN PAM
cuguaaccucaaacucuugg

SEQ ID NO: 28508 - RNA, 20 nt, Artificial Sequence
  HTT spacer sequence GTCN PAM
aagaguuugagguuacagug

SEQ ID NO: 28509 - RNA, 20 nt, Artificial Sequence
  HTT spacer sequence GTCN PAM
cuuuaaugauauuaauuauu

SEQ ID NO: 28510 - RNA, 20 nt, Artificial Sequence
  HTT spacer sequence GTCN PAM
gaagcaaucuacauauucaa

SEQ ID NO: 28511 - RNA, 20 nt, Artificial Sequence
  HTT spacer sequence GTCN PAM
gguaauguaauaucuccagc

SEQ ID NO: 28512 - RNA, 20 nt, Artificial Sequence
  HTT spacer sequence GTCN PAM
aguuuuauaccaguaacaug

SEQ ID NO: 28513 - RNA, 20 nt, Artificial Sequence
  HTT spacer sequence GTCN PAM
ggccagguaacagaucccag

SEQ ID NO: 28514 - RNA, 20 nt, Artificial Sequence
  HTT spacer sequence GTCN PAM
acuaaccauguccagucugg

SEQ ID NO: 28515 - RNA, 20 nt, Artificial Sequence
  HTT spacer sequence GTCN PAM
agucuggaugggaggucaca

SEQ ID NO: 28516 - RNA, 20 nt, Artificial Sequence
  HTT spacer sequence GTCN PAM
ggaugggaggucacaggguc

SEQ ID NO: 28517 - RNA, 20 nt, Artificial Sequence
  HTT spacer sequence GTCN PAM
cagggucaccuuuaacucca

SEQ ID NO: 28518 - RNA, 20 nt, Artificial Sequence
  HTT spacer sequence GTCN PAM
ccuuuaacuccaaggggaag

SEQ ID NO: 28519 - RNA, 20 nt, Artificial Sequence
  HTT spacer sequence GTCN PAM
gugucuuauuuaauacauuu

SEQ ID NO: 28520 - RNA, 20 nt, Artificial Sequence
  HTT spacer sequence GTCN PAM
uauuuaauacauuuauuacu

SEQ ID NO: 28521 - RNA, 20 nt, Artificial Sequence
  HTT spacer sequence GTCN PAM
aaacagauuuucucccuuuu

SEQ ID NO: 28522 - RNA, 20 nt, Artificial Sequence
  HTT spacer sequence GTCN PAM
auuauuugaaaaucaaucau

SEQ ID NO: 28523 - RNA, 20 nt, Artificial Sequence
  HTT spacer sequence GTCN PAM
guguuugagugagacuaucu

SEQ ID NO: 28524 - RNA, 20 nt, Artificial Sequence
  HTT spacer sequence GTCN PAM
cacucaaacacagacuuuaa

SEQ ID NO: 28525 - RNA, 20 nt, Artificial Sequence
  HTT spacer sequence GTCN PAM
cacaaaacaaaaaauuaaug

SEQ ID NO: 28526 - RNA, 20 nt, Artificial Sequence
  HTT spacer sequence GTCN PAM
auuauuaaucuggugaaagc

SEQ ID NO: 28527 - RNA, 20 nt, Artificial Sequence
  HTT spacer sequence GTCN PAM
gaacaaucugccacuuauag

SEQ ID NO: 28528 - RNA, 20 nt, Artificial Sequence
  HTT spacer sequence GTCN PAM
cugauguguugggugacugg

SEQ ID NO: 28529 - RNA, 20 nt, Artificial Sequence
  HTT spacer sequence GTCN PAM
cccaacacaucagugacccg

SEQ ID NO: 28530 - RNA, 20 nt, Artificial Sequence
  HTT spacer sequence GTCN PAM
uggcucugggauauuacugc

SEQ ID NO: 28531 - RNA, 20 nt, Artificial Sequence
  HTT spacer sequence GTCN PAM
auugcuugggacaucauagg

SEQ ID NO: 28532 - RNA, 20 nt, Artificial Sequence
  HTT spacer sequence GTCN PAM
caagcaauugacuaggacua

SEQ ID NO: 28533 - RNA, 20 nt, Artificial Sequence
  HTT spacer sequence GTCN PAM
uuucauguguaauauucauc

SEQ ID NO: 28534 - RNA, 20 nt, Artificial Sequence
  HTT spacer sequence GTCN PAM
caaucuaaauaauaucacag

SEQ ID NO: 28535 - RNA, 20 nt, Artificial Sequence
  HTT spacer sequence GTCN PAM
uuccuuccaugcccgcaaua

SEQ ID NO: 28536 - RNA, 20 nt, Artificial Sequence
  HTT spacer sequence GTCN PAM
gcaucugugacguggcugcc

SEQ ID NO: 28537 - RNA, 20 nt, Artificial Sequence
  HTT spacer sequence GTCN PAM
cagaugcugacauacacauu

SEQ ID NO: 28538 - RNA, 20 nt, Artificial Sequence
  HTT spacer sequence GTCN PAM
ucucauuggccaggaagggg

SEQ ID NO: 28539 - RNA, 20 nt, Artificial Sequence
  HTT spacer sequence GTCN PAM
ugccccccaacccacuuccc

SEQ ID NO: 28540 - RNA, 20 nt, Artificial Sequence
  HTT spacer sequence GTCN PAM
cacacagugccugucagggg

SEQ ID NO: 28541 - RNA, 20 nt, Artificial Sequence
  HTT spacer sequence GTCN PAM
gggggcuuacuuugggugcc

SEQ ID NO: 28542 - RNA, 20 nt, Artificial Sequence
  HTT spacer sequence GTCN PAM
ucuggcacccaaaguaagcc

SEQ ID NO: 28543 - RNA, 20 nt, Artificial Sequence
  HTT spacer sequence GTCN PAM
guccucuggcacccaaagua

SEQ ID NO: 28544 - RNA, 20 nt, Artificial Sequence
  HTT spacer sequence GTCN PAM
cagggccagggcuggcagug

SEQ ID NO: 28545 - RNA, 20 nt, Artificial Sequence
  HTT spacer sequence GTCN PAM
acugccagcccuggcccugc

SEQ ID NO: 28546 - RNA, 20 nt, Artificial Sequence
  HTT spacer sequence GTCN PAM
gggcaugguugcccuugccg

SEQ ID NO: 28547 - RNA, 20 nt, Artificial Sequence
  HTT spacer sequence GTCN PAM
gacaggaugugcagaauucc

SEQ ID NO: 28548 - RNA, 20 nt, Artificial Sequence
  HTT spacer sequence GTCN PAM
gaccaccccaaccucggcac

SEQ ID NO: 28549 - RNA, 20 nt, Artificial Sequence
  HTT spacer sequence GTCN PAM
cggagggccacacgguaggg

SEQ ID NO: 28550 - RNA, 20 nt, Artificial Sequence
  HTT spacer sequence GTCN PAM
ccucccccuugggagguucc

SEQ ID NO: 28551 - RNA, 20 nt, Artificial Sequence
  HTT spacer sequence GTCN PAM
aaacaagugaggcccagagg

SEQ ID NO: 28552 - RNA, 20 nt, Artificial Sequence
  HTT spacer sequence GTCN PAM
uaaagccccagugaccucca

SEQ ID NO: 28553 - RNA, 20 nt, Artificial Sequence
  HTT spacer sequence GTCN PAM
cuggggcuuuaagacccccc

SEQ ID NO: 28554 - RNA, 20 nt, Artificial Sequence
  HTT spacer sequence GTCN PAM
uccucucugccaaggcgagg

SEQ ID NO: 28555 - RNA, 20 nt, Artificial Sequence
  HTT spacer sequence GTCN PAM
uugccaggccgucugggagg

SEQ ID NO: 28556 - RNA, 20 nt, Artificial Sequence
  HTT spacer sequence GTCN PAM
gggagguccccgcaggaagg

SEQ ID NO: 28557 - RNA, 20 nt, Artificial Sequence
  HTT spacer sequence GTCN PAM
ccgcaggaagggguuccugc

SEQ ID NO: 28558 - RNA, 20 nt, Artificial Sequence
  HTT spacer sequence GTCN PAM
agccucuggagcuccauucu

SEQ ID NO: 28559 - RNA, 20 nt, Artificial Sequence
  HTT spacer sequence GTCN PAM
ccuggugagccagccucuuc

SEQ ID NO: 28560 - RNA, 20 nt, Artificial Sequence
  HTT spacer sequence GTCN PAM
ugggcuugucccguaccugc

SEQ ID NO: 28561 - RNA, 20 nt, Artificial Sequence
  HTT spacer sequence GTCN PAM
cguaccugccugacggcucu

SEQ ID NO: 28562 - RNA, 20 nt, Artificial Sequence
  HTT spacer sequence GTCN PAM
ggcagguacgggacaagccc

SEQ ID NO: 28563 - RNA, 20 nt, Artificial Sequence
  HTT spacer sequence GTCN PAM
cccugaucagggcucccguu

SEQ ID NO: 28564 - RNA, 20 nt, Artificial Sequence
  HTT spacer sequence GTCN PAM
gcugagccaggaggaagccg

SEQ ID NO: 28565 - RNA, 20 nt, Artificial Sequence
  HTT spacer sequence GTCN PAM
cgaguucucggccuccuccu

SEQ ID NO: 28566 - RNA, 20 nt, Artificial Sequence
  HTT spacer sequence GTCN PAM
cgcuggccuuccgguaccgc

SEQ ID NO: 28567 - RNA, 20 nt, Artificial Sequence
  HTT spacer sequence GTCN PAM
aguuaugaaggagggguggc

SEQ ID NO: 28568 - RNA, 20 nt, Artificial Sequence
  HTT spacer sequence GTCN PAM
guucuugucccuggugccuu

SEQ ID NO: 28569 - RNA, 20 nt, Artificial Sequence
  HTT spacer sequence GTCN PAM
cuggugccuuuaagccagcc

SEQ ID NO: 28570 - RNA, 20 nt, Artificial Sequence
  HTT spacer sequence GTCN PAM
ccccaacccuccugcuggug

SEQ ID NO: 28571 - RNA, 20 nt, Artificial Sequence
  HTT spacer sequence GTCN PAM
agcccagagccaagccccgg

SEQ ID NO: 28572 - RNA, 20 nt, Artificial Sequence
  HTT spacer sequence GTCN PAM
uugcgccucucuaggccccg

SEQ ID NO: 28573 - RNA, 20 nt, Artificial Sequence
  HTT spacer sequence GTCN PAM
uggcacacaggcacugagug

SEQ ID NO: 28574 - RNA, 20 nt, Artificial Sequence
  HTT spacer sequence GTCN PAM
acucagugccugugugccau

SEQ ID NO: 28575 - RNA, 20 nt, Artificial Sequence
  HTT spacer sequence GTCN PAM
uggguggcgucacggcacgu

SEQ ID NO: 28576 - RNA, 20 nt, Artificial Sequence
  HTT spacer sequence GTCN PAM
cggcacgugggcacugagug

SEQ ID NO: 28577 - RNA, 20 nt, Artificial Sequence
  HTT spacer sequence GTCN PAM
cuuacagggcaugaugcuac

SEQ ID NO: 28578 - RNA, 20 nt, Artificial Sequence
  HTT spacer sequence GTCN PAM
augaaaccaacuucacaaac

SEQ ID NO: 28579 - RNA, 20 nt, Artificial Sequence
  HTT spacer sequence GTCN PAM
uaguaacagcgucaaugaaa

SEQ ID NO: 28580 - RNA, 20 nt, Artificial Sequence
  HTT spacer sequence GTCN PAM
gacauguugggaucuguucu

SEQ ID NO: 28581 - RNA, 20 nt, Artificial Sequence
  HTT spacer sequence GTCN PAM
gacauuacagucuuaguaac

SEQ ID NO: 28582 - RNA, 20 nt, Artificial Sequence
  HTT spacer sequence GTCN PAM
uccuuuucaugugaaaagaa

SEQ ID NO: 28583 - RNA, 20 nt, Artificial Sequence
  HTT spacer sequence GTCN PAM
ccuaguuugggcggaguggg

SEQ ID NO: 28584 - RNA, 20 nt, Artificial Sequence
  HTT spacer sequence GTCN PAM
cggcucccacuccgcccaaa

SEQ ID NO: 28585 - RNA, 20 nt, Artificial Sequence
  HTT spacer sequence GTCN PAM
agagucacggcucccacucc

SEQ ID NO: 28586 - RNA, 20 nt, Artificial Sequence
  HTT spacer sequence GTCN PAM
ggcuuucccgggacaccucc

SEQ ID NO: 28587 - RNA, 20 nt, Artificial Sequence
  HTT spacer sequence GTCN PAM
cgggaaagccagacggccca

SEQ ID NO: 28588 - RNA, 20 nt, Artificial Sequence
  HTT spacer sequence GTCN PAM
gccccuuguguuccucagau

SEQ ID NO: 28589 - RNA, 20 nt, Artificial Sequence
  HTT spacer sequence GTCN PAM
aucugaggaacacaaggggc

SEQ ID NO: 28590 - RNA, 20 nt, Artificial Sequence
  HTT spacer sequence GTCN PAM
ugaggcuuaauuaacucaug

SEQ ID NO: 28591 - RNA, 20 nt, Artificial Sequence
  HTT spacer sequence GTCN PAM
cucucucuuuucuuucaguc

SEQ ID NO: 28592 - RNA, 20 nt, Artificial Sequence
  HTT spacer sequence GTCN PAM
gcaacugugucugauggcgg

SEQ ID NO: 28593 - RNA, 20 nt, Artificial Sequence
  HTT spacer sequence GTCN PAM
gauggcgguaagucacaauu

SEQ ID NO: 28594 - RNA, 20 nt, Artificial Sequence
  HTT spacer sequence GTCN PAM
caauuucugauguauauauu

SEQ ID NO: 28595 - RNA, 20 nt, Artificial Sequence
  HTT spacer sequence GTCN PAM
uuccugagggcaucaaaugg

SEQ ID NO: 28596 - RNA, 20 nt, Artificial Sequence
  HTT spacer sequence GTCN PAM
ccuugugggcggguucuagg

SEQ ID NO: 28597 - RNA, 20 nt, Artificial Sequence
  HTT spacer sequence GTCN PAM
cagaaagcgcccccagaauu

SEQ ID NO: 28598 - RNA, 20 nt, Artificial Sequence
  HTT spacer sequence GTCN PAM
gaggagugcacccacccgcc

SEQ ID NO: 28599 - RNA, 20 nt, Artificial Sequence
  HTT spacer sequence GTCN PAM
gacaaguuaaaacguguuuu

SEQ ID NO: 28600 - RNA, 20 nt, Artificial Sequence
  HTT spacer sequence GTCN PAM
gacacaggcaggcggguggg

SEQ ID NO: 28601 - RNA, 20 nt, Artificial Sequence
  HTT spacer sequence GTCN PAM
cacccaaauuuccugaauug

SEQ ID NO: 28602 - RNA, 20 nt, Artificial Sequence
  HTT spacer sequence GTCN PAM
auuauacuuuucuugagaaa

SEQ ID NO: 28603 - RNA, 20 nt, Artificial Sequence
  HTT spacer sequence GTCN PAM
augaaaagaaucccugugca

SEQ ID NO: 28604 - RNA, 20 nt, Artificial Sequence
  HTT spacer sequence GTCN PAM
uauuucacugaagauuucuc

SEQ ID NO: 28605 - RNA, 20 nt, Artificial Sequence
  HTT spacer sequence GTCN PAM
uccuuaucauuuugguucaa

SEQ ID NO: 28606 - RNA, 20 nt, Artificial Sequence
  HTT spacer sequence GTCN PAM
ggaguguuagaagaaaagag

SEQ ID NO: 28607 - RNA, 20 nt, Artificial Sequence
  HTT spacer sequence GTCN PAM
gcaggcucucggguuucauc

SEQ ID NO: 28608 - RNA, 20 nt, Artificial Sequence
  HTT spacer sequence GTCN PAM
ccucacgcuuuuguccccac

SEQ ID NO: 28609 - RNA, 20 nt, Artificial Sequence
  HTT spacer sequence GTCN PAM
ccacuucugucccugagagc

SEQ ID NO: 28610 - RNA, 20 nt, Artificial Sequence
  HTT spacer sequence GTCN PAM
cugagagcuggaauaggugc

SEQ ID NO: 28611 - RNA, 20 nt, Artificial Sequence
  HTT spacer sequence GTCN PAM
uucucucacuuucugugguc

SEQ ID NO: 28612 - RNA, 20 nt, Artificial Sequence
  HTT spacer sequence GTCN PAM
ugcagcugcuggccucaguc

SEQ ID NO: 28613 - RNA, 20 nt, Artificial Sequence
  HTT spacer sequence GTCN PAM
ucggccucggaaagggcugc

SEQ ID NO: 28614 - RNA, 20 nt, Artificial Sequence
  HTT spacer sequence GTCN PAM
ccagguaggcagacagagcu

SEQ ID NO: 28615 - RNA, 20 nt, Artificial Sequence
  HTT spacer sequence GTCN PAM
gccuaccuggggacagcagc

SEQ ID NO: 28616 - RNA, 20 nt, Artificial Sequence
  HTT spacer sequence GTCN PAM
uccuggccuuccuacagagu

SEQ ID NO: 28617 - RNA, 20 nt, Artificial Sequence
  HTT spacer sequence GTCN PAM
gcccaccugggguccuccug

SEQ ID NO: 28618 - RNA, 20 nt, Artificial Sequence
  HTT spacer sequence GTCN PAM
cggcuucaggugccagugcg

SEQ ID NO: 28619 - RNA, 20 nt, Artificial Sequence
  HTT spacer sequence GTCN PAM
ggaucccucuggucucggcu

SEQ ID NO: 28620 - RNA, 20 nt, Artificial Sequence
  HTT spacer sequence GTCN PAM
uuuaaucagucuuaaggugg

SEQ ID NO: 28621 - RNA, 20 nt, Artificial Sequence
  HTT spacer sequence GTCN PAM
uaagguggagggaggauaaa

SEQ ID NO: 28622 - RNA, 20 nt, Artificial Sequence
  HTT spacer sequence GTCN PAM
uguuucuuuucauuaaggaa

SEQ ID NO: 28623 - RNA, 20 nt, Artificial Sequence
  HTT spacer sequence GTCN PAM
cuuuauccuggauuugguuc

SEQ ID NO: 28624 - RNA, 20 nt, Artificial Sequence
  HTT spacer sequence GTCN PAM
ucugccagaaaggagaagug

SEQ ID NO: 28625 - RNA, 20 nt, Artificial Sequence
  HTT spacer sequence GTCN PAM
gcaauagaugcaggaaccca

SEQ ID NO: 28626 - RNA, 20 nt, Artificial Sequence
  HTT spacer sequence GTCN PAM
auuuuacaguuguuuaaaaa

SEQ ID NO: 28627 - RNA, 20 nt, Artificial Sequence
  HTT spacer sequence GTCN PAM
cuagcuccucgccgugcugg

SEQ ID NO: 28628 - RNA, 20 nt, Artificial Sequence
  HTT spacer sequence GTCN PAM
cucugaggaaguguguccug

SEQ ID NO: 28629 - RNA, 20 nt, Artificial Sequence
  HTT spacer sequence GTCN PAM
uggcuccucgccacgcuggc

SEQ ID NO: 28630 - RNA, 20 nt, Artificial Sequence
  HTT spacer sequence GTCN PAM
cucugaggaaguguauccug

SEQ ID NO: 28631 - RNA, 20 nt, Artificial Sequence
  HTT spacer sequence GTCN PAM
gacccuggggccacugggac

SEQ ID NO: 28632 - RNA, 20 nt, Artificial Sequence
  HTT spacer sequence GTCN PAM
gacacugggaaaagaaggag

SEQ ID NO: 28633 - RNA, 20 nt, Artificial Sequence
  HTT spacer sequence GTCN PAM
caguggccccagggucugac

SEQ ID NO: 28634 - RNA, 20 nt, Artificial Sequence
  HTT spacer sequence GTCN PAM
cuccauggagagccccaguc

SEQ ID NO: 28635 - RNA, 20 nt, Artificial Sequence
  HTT spacer sequence GTCN PAM
cagaggaggagacgggaggg

SEQ ID NO: 28636 - RNA, 20 nt, Artificial Sequence
  HTT spacer sequence GTCN PAM
ccuccucugugacuggggcu

SEQ ID NO: 28637 - RNA, 20 nt, Artificial Sequence
  HTT spacer sequence GTCN PAM
ccuccucccucccgucuccu

SEQ ID NO: 28638 - RNA, 20 nt, Artificial Sequence
  HTT spacer sequence GTCN PAM
ccuccucccucccgucuccu

SEQ ID NO: 28639 - RNA, 20 nt, Artificial Sequence
  HTT spacer sequence GTCN PAM
ccuccucccucccgucuccu

SEQ ID NO: 28640 - RNA, 20 nt, Artificial Sequence
  HTT spacer sequence GTCN PAM
ccucccucccgucuccuccu

SEQ ID NO: 28641 - RNA, 20 nt, Artificial Sequence
  HTT spacer sequence GTCN PAM
ucagcacacccugaauuuca

SEQ ID NO: 28642 - RNA, 20 nt, Artificial Sequence
  HTT spacer sequence GTCN PAM
cauucugccguuguuagaug

SEQ ID NO: 28643 - RNA, 20 nt, Artificial Sequence
  HTT spacer sequence GTCN PAM
gcaggugagauggccagacu

SEQ ID NO: 28644 - RNA, 20 nt, Artificial Sequence
  HTT spacer sequence GTCN PAM
ggccaucucaccugcagacu

SEQ ID NO: 28645 - RNA, 20 nt, Artificial Sequence
  HTT spacer sequence GTCN PAM
uggagagucccccgcuccag

SEQ ID NO: 28646 - RNA, 20 nt, Artificial Sequence
  HTT spacer sequence GTCN PAM
cccgcuccagcccuggaccc

SEQ ID NO: 28647 - RNA, 20 nt, Artificial Sequence
  HTT spacer sequence GTCN PAM
agggcuggagcgggggacuc

SEQ ID NO: 28648 - RNA, 20 nt, Artificial Sequence
  HTT spacer sequence GTCN PAM
cugccguggagggcagggug

SEQ ID NO: 28649 - RNA, 20 nt, Artificial Sequence
  HTT spacer sequence GTCN PAM
ggguggggggguggucccag

SEQ ID NO: 28650 - RNA, 20 nt, Artificial Sequence
  HTT spacer sequence GTCN PAM
cagggaaacucuggcugugu

SEQ ID NO: 28651 - RNA, 20 nt, Artificial Sequence
  HTT spacer sequence GTCN PAM
gugggagacucagugcacug

SEQ ID NO: 28652 - RNA, 20 nt, Artificial Sequence
  HTT spacer sequence GTCN PAM
cccacugaccacagccuaua

SEQ ID NO: 28653 - RNA, 20 nt, Artificial Sequence
  HTT spacer sequence GTCN PAM
cuccuuggaacucggggagc

SEQ ID NO: 28654 - RNA, 20 nt, Artificial Sequence
  HTT spacer sequence GTCN PAM
cugccuggucauccugucua

SEQ ID NO: 28655 - RNA, 20 nt, Artificial Sequence
  HTT spacer sequence GTCN PAM
uccugucuaguuuuggugau

SEQ ID NO: 28656 - RNA, 20 nt, Artificial Sequence
  HTT spacer sequence GTCN PAM
aguuuuggugauuaauagau

SEQ ID NO: 28657 - RNA, 20 nt, Artificial Sequence
  HTT spacer sequence GTCN PAM
cagaaugaaaccguggcaug

SEQ ID NO: 28658 - RNA, 20 nt, Artificial Sequence
  HTT spacer sequence GTCN PAM
aacuuccuuaaaaccgagcc

SEQ ID NO: 28659 - RNA, 20 nt, Artificial Sequence
  HTT spacer sequence GTCN PAM
aguuggaguguguuuuuuca

SEQ ID NO: 28660 - RNA, 20 nt, Artificial Sequence
  HTT spacer sequence GTCN PAM
cuggggggcacggcagggcu

SEQ ID NO: 28661 - RNA, 20 nt, Artificial Sequence
  HTT spacer sequence GTCN PAM
gccuugugggaaguuauuca

SEQ ID NO: 28662 - RNA, 20 nt, Artificial Sequence
  HTT spacer sequence GTCN PAM
gaauaacuucccacaaggca

SEQ ID NO: 28663 - RNA, 20 nt, Artificial Sequence
  HTT spacer sequence GTCN PAM
agcuggagggagauggggcg

SEQ ID NO: 28664 - RNA, 20 nt, Artificial Sequence
  HTT spacer sequence GTCN PAM
ggcucugcacagagcuggag

SEQ ID NO: 28665 - RNA, 20 nt, Artificial Sequence
  HTT spacer sequence GTCN PAM
agcucugugccaagaggccu

SEQ ID NO: 28666 - RNA, 20 nt, Artificial Sequence
  HTT spacer sequence GTCN PAM
cagcgggaacauccaccugu

SEQ ID NO: 28667 - RNA, 20 nt, Artificial Sequence
  HTT spacer sequence GTCN PAM
ggguguggagacuaucgggg

SEQ ID NO: 28668 - RNA, 20 nt, Artificial Sequence
  HTT spacer sequence GTCN PAM
ccacaccccgacuucagaag

SEQ ID NO: 28669 - RNA, 20 nt, Artificial Sequence
  HTT spacer sequence GTCN PAM
gugccagcaggaaagccggg

SEQ ID NO: 28670 - RNA, 20 nt, Artificial Sequence
  HTT spacer sequence GTCN PAM
cccaaagccagagccgcaca

SEQ ID NO: 28671 - RNA, 20 nt, Artificial Sequence
  HTT spacer sequence GTCN PAM
acaugacaccccacauacau

SEQ ID NO: 28672 - RNA, 20 nt, Artificial Sequence
  HTT spacer sequence GTCN PAM
uguggaccugccaccguccc

SEQ ID NO: 28673 - RNA, 20 nt, Artificial Sequence
  HTT spacer sequence GTCN PAM
uguauguggggugucaugug

SEQ ID NO: 28674 - RNA, 20 nt, Artificial Sequence
  HTT spacer sequence GTCN PAM
ccagggugaggcugcgagaa

SEQ ID NO: 28675 - RNA, 20 nt, Artificial Sequence
  HTT spacer sequence GTCN PAM
gggguccccagggugaggcu

SEQ ID NO: 28676 - RNA, 20 nt, Artificial Sequence
  HTT spacer sequence GTCN PAM
caguccuccauccccauguc

SEQ ID NO: 28677 - RNA, 20 nt, Artificial Sequence
  HTT spacer sequence GTCN PAM
uccauccccauguccuccuc

SEQ ID NO: 28678 - RNA, 20 nt, Artificial Sequence
  HTT spacer sequence GTCN PAM
uccucaugccuugugccuca

SEQ ID NO: 28679 - RNA, 20 nt, Artificial Sequence
  HTT spacer sequence GTCN PAM
gggcagagcugaggcacaag

SEQ ID NO: 28680 - RNA, 20 nt, Artificial Sequence
  HTT spacer sequence GTCN PAM
acucagcugccccccuacuc

SEQ ID NO: 28681 - RNA, 20 nt, Artificial Sequence
  HTT spacer sequence GTCN PAM
uccaugcagaccucagucuu

SEQ ID NO: 28682 - RNA, 20 nt, Artificial Sequence
  HTT spacer sequence GTCN PAM
gcauggaggacgaguagggg

SEQ ID NO: 28683 - RNA, 20 nt, Artificial Sequence
  HTT spacer sequence GTCN PAM
uggcccugucucugcagcca

SEQ ID NO: 28684 - RNA, 20 nt, Artificial Sequence
  HTT spacer sequence GTCN PAM
cugcagccauccucccgcuc

SEQ ID NO: 28685 - RNA, 20 nt, Artificial Sequence
  HTT spacer sequence GTCN PAM
agugcaggggcugggcagau

SEQ ID NO: 28686 - RNA, 20 nt, Artificial Sequence
  HTT spacer sequence GTCN PAM
cacccuggucuccaauggug

SEQ ID NO: 28687 - RNA, 20 nt, Artificial Sequence
  HTT spacer sequence GTCN PAM
ccaauggugccucaggcaca

SEQ ID NO: 28688 - RNA, 20 nt, Artificial Sequence
  HTT spacer sequence GTCN PAM
ggaagggaagagggaaaccg

SEQ ID NO: 28689 - RNA, 20 nt, Artificial Sequence
  HTT spacer sequence GTCN PAM
auuuccugcccgugcuaggg

SEQ ID NO: 28690 - RNA, 20 nt, Artificial Sequence
  HTT spacer sequence GTCN PAM
ccccagcuggugugaccucc

SEQ ID NO: 28691 - RNA, 20 nt, Artificial Sequence
  HTT spacer sequence GTCN PAM
caccagcuggggggacaaaa

SEQ ID NO: 28692 - RNA, 20 nt, Artificial Sequence
  HTT spacer sequence GTCN PAM
gaguugucccggcacccggc

SEQ ID NO: 28693 - RNA, 20 nt, Artificial Sequence
  HTT spacer sequence GTCN PAM
cggcacccggcacagcggcu

SEQ ID NO: 28694 - RNA, 20 nt, Artificial Sequence
  HTT spacer sequence GTCN PAM
guugagugaaugaucgggug

SEQ ID NO: 28695 - RNA, 20 nt, Artificial Sequence
  HTT spacer sequence GTCN PAM
gcugaacacccgaucauuca

SEQ ID NO: 28696 - RNA, 20 nt, Artificial Sequence
  HTT spacer sequence GTCN PAM
gggcgaggcuugggcgggga

SEQ ID NO: 28697 - RNA, 20 nt, Artificial Sequence
  HTT spacer sequence GTCN PAM
ccgcccaagccucgcccuga

SEQ ID NO: 28698 - RNA, 20 nt, Artificial Sequence
  HTT spacer sequence GTCN PAM
ugaaaccuucucaaaaagca

SEQ ID NO: 28699 - RNA, 20 nt, Artificial Sequence
  HTT spacer sequence GTCN PAM
cacaggaguuucugcuucug

SEQ ID NO: 28700 - RNA, 20 nt, Artificial Sequence
  HTT spacer sequence GTCN PAM
accccgcaacaccagucaca

SEQ ID NO: 28701 - RNA, 20 nt, Artificial Sequence
  HTT spacer sequence GTCN PAM
gagcuccaaaggcccgcgug

SEQ ID NO: 28702 - RNA, 20 nt, Artificial Sequence
  HTT spacer sequence GTCN PAM
gcuguggagcugcaggugga

SEQ ID NO: 28703 - RNA, 20 nt, Artificial Sequence
  HTT spacer sequence GTCN PAM
cuuucucucuccuagccuug

SEQ ID NO: 28704 - RNA, 20 nt, Artificial Sequence
  HTT spacer sequence GTCN PAM
ucaucucgccgguccuuguu

SEQ ID NO: 28705 - RNA, 20 nt, Artificial Sequence
  HTT spacer sequence GTCN PAM
uuguuagcgaacaggcacug

SEQ ID NO: 28706 - RNA, 20 nt, Artificial Sequence
  HTT spacer sequence GTCN PAM
caaacggcugccugaugggg

SEQ ID NO: 28707 - RNA, 20 nt, Artificial Sequence
  HTT spacer sequence GTCN PAM
cccaaguuaauccggcaauu

SEQ ID NO: 28708 - RNA, 20 nt, Artificial Sequence
  HTT spacer sequence GTCN PAM
gauauuaauauuguuaugcc

SEQ ID NO: 28709 - RNA, 20 nt, Artificial Sequence
  HTT spacer sequence GTCN PAM
uuuuuguucuuuuuauugcu

SEQ ID NO: 28710 - RNA, 20 nt, Artificial Sequence
  HTT spacer sequence GTCN PAM
guuagauuuaauuugcucau

SEQ ID NO: 28711 - RNA, 20 nt, Artificial Sequence
  HTT spacer sequence GTCN PAM
ggagcuauucucuguaugcu

SEQ ID NO: 28712 - RNA, 20 nt, Artificial Sequence
  HTT spacer sequence GTCN PAM
aucauaaaaugauaacaaaa

SEQ ID NO: 28713 - RNA, 20 nt, Artificial Sequence
  HTT spacer sequence GTCN PAM
aggaagaaauuaaaauggga

SEQ ID NO: 28714 - RNA, 20 nt, Artificial Sequence
  HTT spacer sequence GTCN PAM
caaauuccugggcccaagug

SEQ ID NO: 28715 - RNA, 20 nt, Artificial Sequence
  HTT spacer sequence GTCN PAM
aggcuggucucaaauuccug

SEQ ID NO: 28716 - RNA, 20 nt, Artificial Sequence
  HTT spacer sequence GTCN PAM
ucuuccucuuuuucuuuuuu

SEQ ID NO: 28717 - RNA, 20 nt, Artificial Sequence
  HTT spacer sequence GTCN PAM
uucauucuugauguuaucuu

SEQ ID NO: 28718 - RNA, 20 nt, Artificial Sequence
  HTT spacer sequence GTCN PAM
uaaguacaguuagagacuaa

SEQ ID NO: 28719 - RNA, 20 nt, Artificial Sequence
  HTT spacer sequence GTCN PAM
cuaacuguacuuaggaccug

SEQ ID NO: 28720 - RNA, 20 nt, Artificial Sequence
  HTT spacer sequence GTCN PAM
uauaguguuacuucuuaguc

SEQ ID NO: 28721 - RNA, 20 nt, Artificial Sequence
  HTT spacer sequence GTCN PAM
gguuaaucaaauguacagua

SEQ ID NO: 28722 - RNA, 20 nt, Artificial Sequence
  HTT spacer sequence GTCN PAM
aagaucaaaacccccauagg

SEQ ID NO: 28723 - RNA, 20 nt, Artificial Sequence
  HTT spacer sequence GTCN PAM
gcuuaggcuaaguaauauug

SEQ ID NO: 28724 - RNA, 20 nt, Artificial Sequence
  HTT spacer sequence GTCN PAM
uuucccucggccacaaggcc

SEQ ID NO: 28725 - RNA, 20 nt, Artificial Sequence
  HTT spacer sequence GTCN PAM
uggcucucagccauacuguu

SEQ ID NO: 28726 - RNA, 20 nt, Artificial Sequence
  HTT spacer sequence GTCN PAM
cugugaaguccgagcacggu

SEQ ID NO: 28727 - RNA, 20 nt, Artificial Sequence
  HTT spacer sequence GTCN PAM
gagcacgguuuuuacugcgg

SEQ ID NO: 28728 - RNA, 20 nt, Artificial Sequence
  HTT spacer sequence GTCN PAM
ugcccagugaggaaggagcg

SEQ ID NO: 28729 - RNA, 20 nt, Artificial Sequence
  HTT spacer sequence GTCN PAM
gauccaaacagugugacucu

SEQ ID NO: 28730 - RNA, 20 nt, Artificial Sequence
  HTT spacer sequence GTCN PAM
cacuguuuggaucugacuca

SEQ ID NO: 28731 - RNA, 20 nt, Artificial Sequence
  HTT spacer sequence GTCN PAM
acagugugccgguucacggc

SEQ ID NO: 28732 - RNA, 20 nt, Artificial Sequence
  HTT spacer sequence GTCN PAM
gcucuauggcaagcuguauu

SEQ ID NO: 28733 - RNA, 20 nt, Artificial Sequence
  HTT spacer sequence GTCN PAM
gcaccugugaaucgugagaa

SEQ ID NO: 28734 - RNA, 20 nt, Artificial Sequence
  HTT spacer sequence GTCN PAM
cuugcugcguaaaaguccag

SEQ ID NO: 28735 - RNA, 20 nt, Artificial Sequence
  HTT spacer sequence GTCN PAM
agggcuuugcagagccucuc

SEQ ID NO: 28736 - RNA, 20 nt, Artificial Sequence
  HTT spacer sequence GTCN PAM
gcaaggagaagcagucucca

SEQ ID NO: 28737 - RNA, 20 nt, Artificial Sequence
  HTT spacer sequence GTCN PAM
ccagagguggcccccugagc

SEQ ID NO: 28738 - RNA, 20 nt, Artificial Sequence
  HTT spacer sequence GTCN PAM
ggccccuucccaggggugga

SEQ ID NO: 28739 - RNA, 20 nt, Artificial Sequence
  HTT spacer sequence GTCN PAM
acuggcccagggagguaggc

SEQ ID NO: 28740 - RNA, 20 nt, Artificial Sequence
  HTT spacer sequence GTCN PAM
cauguccacuggcccaggga

SEQ ID NO: 28741 - RNA, 20 nt, Artificial Sequence
  HTT spacer sequence GTCN PAM
ccaugcuggucccaugucca

SEQ ID NO: 28742 - RNA, 20 nt, Artificial Sequence
  HTT spacer sequence GTCN PAM
uaaaccgggcuuccaaaaau

SEQ ID NO: 28743 - RNA, 20 nt, Artificial Sequence
  HTT spacer sequence GTCN PAM
uuuguccuaaaccgggcuuc

SEQ ID NO: 28744 - RNA, 20 nt, Artificial Sequence
  HTT spacer sequence GTCN PAM
ucacagucccagcaaauacc

SEQ ID NO: 28745 - RNA, 20 nt, Artificial Sequence
  HTT spacer sequence GTCN PAM
cagcaaauaccauuuauaug

SEQ ID NO: 28746 - RNA, 20 nt, Artificial Sequence
  HTT spacer sequence GTCN PAM
uguguuaccucuuuuuggcu

SEQ ID NO: 28747 - RNA, 20 nt, Artificial Sequence
  HTT spacer sequence GTCN PAM
caaauccuuuaugcuuuuac

SEQ ID NO: 28748 - RNA, 20 nt, Artificial Sequence
  HTT spacer sequence GTCN PAM
ucuggccucaguccugcugg

SEQ ID NO: 28749 - RNA, 20 nt, Artificial Sequence
  HTT spacer sequence GTCN PAM
ugcuggguagggugcccuuu

SEQ ID NO: 28750 - RNA, 20 nt, Artificial Sequence
  HTT spacer sequence GTCN PAM
ucucuaucccuggacucuuu

SEQ ID NO: 28751 - RNA, 20 nt, Artificial Sequence
  HTT spacer sequence GTCN PAM
agggauagagaggacgaaag

SEQ ID NO: 28752 - RNA, 20 nt, Artificial Sequence
  HTT spacer sequence GTCN PAM
ccaggacugugucuucaguu

SEQ ID NO: 28753 - RNA, 20 nt, Artificial Sequence
  HTT spacer sequence GTCN PAM
uggggaccugugcuuccacu

SEQ ID NO: 28754 - RNA, 20 nt, Artificial Sequence
  HTT spacer sequence GTCN PAM
ucaguuuucugugugggugg

SEQ ID NO: 28755 - RNA, 20 nt, Artificial Sequence
  HTT spacer sequence GTCN PAM
uaaacccuucccucaagcca

SEQ ID NO: 28756 - RNA, 20 nt, Artificial Sequence
  HTT spacer sequence GTCN PAM
uccucaugaggucagcauuu

SEQ ID NO: 28757 - RNA, 20 nt, Artificial Sequence
  HTT spacer sequence GTCN PAM
gcauuuggggccccugggcu

SEQ ID NO: 28758 - RNA, 20 nt, Artificial Sequence
  HTT spacer sequence GTCN PAM
ucugcguuggguggcguccu

SEQ ID NO: 28759 - RNA, 20 nt, Artificial Sequence
  HTT spacer sequence GTCN PAM
ucugcguugggugguguccu

SEQ ID NO: 28760 - RNA, 20 nt, Artificial Sequence
  HTT spacer sequence GTCN PAM
ucugguggggccaagccaca

SEQ ID NO: 28761 - RNA, 20 nt, Artificial Sequence
  HTT spacer sequence GTCN PAM
gaacuuccuguguggccacu

SEQ ID NO: 28762 - RNA, 20 nt, Artificial Sequence
  HTT spacer sequence GTCN PAM
uuacaaaguauaaauauuuu

SEQ ID NO: 28763 - RNA, 20 nt, Artificial Sequence
  HTT spacer sequence GTCN PAM
guuucacaaaggaauuaacc

SEQ ID NO: 28764 - RNA, 20 nt, Artificial Sequence
  HTT spacer sequence GTCN PAM
guuaggguugaucuuugaaa

SEQ ID NO: 28765 - RNA, 20 nt, Artificial Sequence
  HTT spacer sequence GTCN PAM
uuucuuggagcauccugagg

SEQ ID NO: 28766 - RNA, 20 nt, Artificial Sequence
  HTT spacer sequence GTCN PAM
gaugugaccucaccaacuac

SEQ ID NO: 28767 - RNA, 20 nt, Artificial Sequence
  HTT spacer sequence GTCN PAM
caucugaccacagggagccc

SEQ ID NO: 28768 - RNA, 20 nt, Artificial Sequence
  HTT spacer sequence GTCN PAM
uaguugguagcucuaagccu

SEQ ID NO: 28769 - RNA, 20 nt, Artificial Sequence
  HTT spacer sequence GTCN PAM
cucugaauuuuuaggauucu

SEQ ID NO: 28770 - RNA, 20 nt, Artificial Sequence
  HTT spacer sequence GTCN PAM
cuugucacucugaauuuuua

SEQ ID NO: 28771 - RNA, 20 nt, Artificial Sequence
  HTT spacer sequence GTCN PAM
uugcacaucgccuaacacuu

SEQ ID NO: 28772 - RNA, 20 nt, Artificial Sequence
  HTT spacer sequence GTCN PAM
gugugggaaguguuaggcga

SEQ ID NO: 28773 - RNA, 20 nt, Artificial Sequence
  HTT spacer sequence GTCN PAM
uucuggagagugaaaugcca

SEQ ID NO: 28774 - RNA, 20 nt, Artificial Sequence
  HTT spacer sequence GTCN PAM
cuucagacguagagaguuug

SEQ ID NO: 28775 - RNA, 20 nt, Artificial Sequence
  HTT spacer sequence GTCN PAM
gaagugacaccaaguccuuc

SEQ ID NO: 28776 - RNA, 20 nt, Artificial Sequence
  HTT spacer sequence GTCN PAM
guacuagaaacgugugauuu

SEQ ID NO: 28777 - RNA, 20 nt, Artificial Sequence
  HTT spacer sequence GTCN PAM
uuccuggagucaguacuaga

SEQ ID NO: 28778 - RNA, 20 nt, Artificial Sequence
  HTT spacer sequence GTCN PAM
gugagaccugccaggcgugg

SEQ ID NO: 28779 - RNA, 20 nt, Artificial Sequence
  HTT spacer sequence GTCN PAM
cacggaccccucgagauaua

SEQ ID NO: 28780 - RNA, 20 nt, Artificial Sequence
  HTT spacer sequence GTCN PAM
ggcugugggggccagacuca

SEQ ID NO: 28781 - RNA, 20 nt, Artificial Sequence
  HTT spacer sequence GTCN PAM
ggcccccacagccagaccuc

SEQ ID NO: 28782 - RNA, 20 nt, Artificial Sequence
  HTT spacer sequence GTCN PAM
gcccagaaagugcugcuggg

SEQ ID NO: 28783 - RNA, 20 nt, Artificial Sequence
  HTT spacer sequence GTCN PAM
cgguauccccagcagcacuu

SEQ ID NO: 28784 - RNA, 20 nt, Artificial Sequence
  HTT spacer sequence GTCN PAM
gggcccagcauagucacuga

SEQ ID NO: 28785 - RNA, 20 nt, Artificial Sequence
  HTT spacer sequence GTCN PAM
cugaugucagcccaggcagg

SEQ ID NO: 28786 - RNA, 20 nt, Artificial Sequence
  HTT spacer sequence GTCN PAM
gcccaggcaggucauggaau

SEQ ID NO: 28787 - RNA, 20 nt, Artificial Sequence
  HTT spacer sequence GTCN PAM
uggaauguuuuggaccucag

SEQ ID NO: 28788 - RNA, 20 nt, Artificial Sequence
  HTT spacer sequence GTCN PAM
aaaacauuccaugaccugcc

SEQ ID NO: 28789 - RNA, 20 nt, Artificial Sequence
  HTT spacer sequence GTCN PAM
aucagcccauuuuacagaug

SEQ ID NO: 28790 - RNA, 20 nt, Artificial Sequence
  HTT spacer sequence GTCN PAM
ggcaagaacagguaggguag

SEQ ID NO: 28791 - RNA, 20 nt, Artificial Sequence
  HTT spacer sequence GTCN PAM
uccuuccuccgcaagccagc

SEQ ID NO: 28792 - RNA, 20 nt, Artificial Sequence
  HTT spacer sequence GTCN PAM
ccacccaaaucucaucuuga

SEQ ID NO: 28793 - RNA, 20 nt, Artificial Sequence
  HTT spacer sequence GTCN PAM
aacuguaucaggcauccuau

SEQ ID NO: 28794 - RNA, 20 nt, Artificial Sequence
  HTT spacer sequence GTCN PAM
cacccguuugugcauccaca

SEQ ID NO: 28795 - RNA, 20 nt, Artificial Sequence
  HTT spacer sequence GTCN PAM
gcugaguguggcaagcacug

SEQ ID NO: 28796 - RNA, 20 nt, Artificial Sequence
  HTT spacer sequence GTCN PAM
ugcaucuccaaguggccugg

SEQ ID NO: 28797 - RNA, 20 nt, Artificial Sequence
  HTT spacer sequence GTCN PAM
ccaucauccccuuggaauca

SEQ ID NO: 28798 - RNA, 20 nt, Artificial Sequence
  HTT spacer sequence GTCN PAM
augagcaucuuucaaaauga

SEQ ID NO: 28799 - RNA, 20 nt, Artificial Sequence
  HTT spacer sequence GTCN PAM
cagcuuccucuucuaccuug

SEQ ID NO: 28800 - RNA, 20 nt, Artificial Sequence
  HTT spacer sequence GTCN PAM
gggacaggucccuuggccac

SEQ ID NO: 28801 - RNA, 20 nt, Artificial Sequence
  HTT spacer sequence GTCN PAM
cugacuagccacaccaccuu

SEQ ID NO: 28802 - RNA, 20 nt, Artificial Sequence
  HTT spacer sequence GTCN PAM
cuuggccacagagccacugg

SEQ ID NO: 28803 - RNA, 20 nt, Artificial Sequence
  HTT spacer sequence GTCN PAM
uggcacauugccacccgcca

SEQ ID NO: 28804 - RNA, 20 nt, Artificial Sequence
  HTT spacer sequence GTCN PAM
ggcagagauggcaguguccc

SEQ ID NO: 28805 - RNA, 20 nt, Artificial Sequence
  HTT spacer sequence GTCN PAM
cuggccacaguguccagcag

SEQ ID NO: 28806 - RNA, 20 nt, Artificial Sequence
  HTT spacer sequence GTCN PAM
agcagcagcauggcagccgc

SEQ ID NO: 28807 - RNA, 20 nt, Artificial Sequence
  HTT spacer sequence GTCN PAM
gacaggggugcugcugugac

SEQ ID NO: 28808 - RNA, 20 nt, Artificial Sequence
  HTT spacer sequence GTCN PAM
gaccacagagcccugcugcg

SEQ ID NO: 28809 - RNA, 20 nt, Artificial Sequence
  HTT spacer sequence GTCN PAM
cagcagcaccccugucugac

SEQ ID NO: 28810 - RNA, 20 nt, Artificial Sequence
  HTT spacer sequence GTCN PAM
caggucacagcagcaccccu

SEQ ID NO: 28811 - RNA, 20 nt, Artificial Sequence
  HTT spacer sequence GTCN PAM
ccaccuucaaaggagcccac

SEQ ID NO: 28812 - RNA, 20 nt, Artificial Sequence
  HTT spacer sequence GTCN PAM
uccucuuucaggauguggcu

SEQ ID NO: 28813 - RNA, 20 nt, Artificial Sequence
  HTT spacer sequence GTCN PAM
ccaagaaccaaggggaaggc

SEQ ID NO: 28814 - RNA, 20 nt, Artificial Sequence
  HTT spacer sequence GTCN PAM
cagcgcucucggccagucug

SEQ ID NO: 28815 - RNA, 20 nt, Artificial Sequence
  HTT spacer sequence GTCN PAM
gggaguggcagccaggccac

SEQ ID NO: 28816 - RNA, 20 nt, Artificial Sequence
  HTT spacer sequence GTCN PAM
acccuccggcauccugugug

SEQ ID NO: 28817 - RNA, 20 nt, Artificial Sequence
  HTT spacer sequence GTCN PAM
guggcuacagccccaacggc

SEQ ID NO: 28818 - RNA, 20 nt, Artificial Sequence
  HTT spacer sequence GTCN PAM
ugggccagccccuugggggc

SEQ ID NO: 28819 - RNA, 20 nt, Artificial Sequence
  HTT spacer sequence GTCN PAM
cagagccccauucaugcucc

SEQ ID NO: 28820 - RNA, 20 nt, Artificial Sequence
  HTT spacer sequence GTCN PAM
ccugugcagccaccagccgc

SEQ ID NO: 28821 - RNA, 20 nt, Artificial Sequence
  HTT spacer sequence GTCN PAM
cccgccuugcaugaggcccu

SEQ ID NO: 28822 - RNA, 20 nt, Artificial Sequence
  HTT spacer sequence GTCN PAM
gggccucaugcaaggcgggg

SEQ ID NO: 28823 - RNA, 20 nt, Artificial Sequence
  HTT spacer sequence GTCN PAM
ugucagggccucaugcaagg

SEQ ID NO: 28824 - RNA, 20 nt, Artificial Sequence
  HTT spacer sequence GTCN PAM
ccggugggccacaaggguug

SEQ ID NO: 28825 - RNA, 20 nt, Artificial Sequence
  HTT spacer sequence GTCN PAM
cuuggaucacaggggcagug

SEQ ID NO: 28826 - RNA, 20 nt, Artificial Sequence
  HTT spacer sequence GTCN PAM
gccgauguggcucaguccug

SEQ ID NO: 28827 - RNA, 20 nt, Artificial Sequence
  HTT spacer sequence GTCN PAM
uggcugugaggccucacgcu

SEQ ID NO: 28828 - RNA, 20 nt, Artificial Sequence
  HTT spacer sequence GTCN PAM
gccucgcacugaggagcaaa

SEQ ID NO: 28829 - RNA, 20 nt, Artificial Sequence
  HTT spacer sequence GTCN PAM
ggaugggaugaaaugaagac

SEQ ID NO: 28830 - RNA, 20 nt, Artificial Sequence
  HTT spacer sequence GTCN PAM
ucauuucaucccauccagac

SEQ ID NO: 28831 - RNA, 20 nt, Artificial Sequence
  HTT spacer sequence GTCN PAM
ccucccuaacgggacacugu

SEQ ID NO: 28832 - RNA, 20 nt, Artificial Sequence
  HTT spacer sequence GTCN PAM
cguuagggaggagacgucuu

SEQ ID NO: 28833 - RNA, 20 nt, Artificial Sequence
  HTT spacer sequence GTCN PAM
accccuuccuucuucucccc

SEQ ID NO: 28834 - RNA, 20 nt, Artificial Sequence
  HTT spacer sequence GTCN PAM
gccccgugaggauggggucu

SEQ ID NO: 28835 - RNA, 20 nt, Artificial Sequence
  HTT spacer sequence GTCN PAM
aggguagggcauguggacgg

SEQ ID NO: 28836 - RNA, 20 nt, Artificial Sequence
  HTT spacer sequence GTCN PAM
acaugcccuacccuagaccc

SEQ ID NO: 28837 - RNA, 20 nt, Artificial Sequence
  HTT spacer sequence GTCN PAM
aggugcuuaucuucuagggu

SEQ ID NO: 28838 - RNA, 20 nt, Artificial Sequence
  HTT spacer sequence GTCN PAM
ccaaccccagggugguggag

SEQ ID NO: 28839 - RNA, 20 nt, Artificial Sequence
  HTT spacer sequence GTCN PAM
cucggauggggcugacaccc

SEQ ID NO: 28840 - RNA, 20 nt, Artificial Sequence
  HTT spacer sequence GTCN PAM
gccccauccgagagacggcc

SEQ ID NO: 28841 - RNA, 20 nt, Artificial Sequence
  HTT spacer sequence GTCN PAM
gugccuugggugucagcccc

SEQ ID NO: 28842 - RNA, 20 nt, Artificial Sequence
  HTT spacer sequence GTCN PAM
cccaaagcacauggccucuc

SEQ ID NO: 28843 - RNA, 20 nt, Artificial Sequence
  HTT spacer sequence GTCN PAM
cauccagguucuucugcaga

SEQ ID NO: 28844 - RNA, 20 nt, Artificial Sequence
  HTT spacer sequence GTCN PAM
ccaagcucuggccugggcau

SEQ ID NO: 28845 - RNA, 20 nt, Artificial Sequence
  HTT spacer sequence GTCN PAM
agcuguccccaagcucuggc

SEQ ID NO: 28846 - RNA, 20 nt, Artificial Sequence
  HTT spacer sequence GTCN PAM
aggagggggaguccagaagc

SEQ ID NO: 28847 - RNA, 20 nt, Artificial Sequence
  HTT spacer sequence GTCN PAM
agaagcgcaaaguccaccca

SEQ ID NO: 28848 - RNA, 20 nt, Artificial Sequence
  HTT spacer sequence GTCN PAM
acccagcugggagggcugcu

SEQ ID NO: 28849 - RNA, 20 nt, Artificial Sequence
  HTT spacer sequence GTCN PAM
uuuacaaagcaggcagcucc

SEQ ID NO: 28850 - RNA, 20 nt, Artificial Sequence
  HTT spacer sequence GTCN PAM
ccaccucuucugcccccauc

SEQ ID NO: 28851 - RNA, 20 nt, Artificial Sequence
  HTT spacer sequence GTCN PAM
uggacccgcccaccugcacu

SEQ ID NO: 28852 - RNA, 20 nt, Artificial Sequence
  HTT spacer sequence GTCN PAM
aggacccacagugccgccuc

SEQ ID NO: 28853 - RNA, 20 nt, Artificial Sequence
  HTT spacer sequence GTCN PAM
cugcaggcuuuuaaugggaa

SEQ ID NO: 28854 - RNA, 20 nt, Artificial Sequence
  HTT spacer sequence GTCN PAM
cuuccuccauuucuguuccc

SEQ ID NO: 28855 - RNA, 20 nt, Artificial Sequence
  HTT spacer sequence GTCN PAM
gggagccccuggcagccucu

SEQ ID NO: 28856 - RNA, 20 nt, Artificial Sequence
  HTT spacer sequence GTCN PAM
ccucagugugggggaagccu

SEQ ID NO: 28857 - RNA, 20 nt, Artificial Sequence
  HTT spacer sequence GTCN PAM
guuguccgggugucuaguga

SEQ ID NO: 28858 - RNA, 20 nt, Artificial Sequence
  HTT spacer sequence GTCN PAM
gggugucuagugaccccugg

SEQ ID NO: 28859 - RNA, 20 nt, Artificial Sequence
  HTT spacer sequence GTCN PAM
agugaccccugggguagggg

SEQ ID NO: 28860 - RNA, 20 nt, Artificial Sequence
  HTT spacer sequence GTCN PAM
cuagacacccggacaacaga

SEQ ID NO: 28861 - RNA, 20 nt, Artificial Sequence
  HTT spacer sequence GTCN PAM
gggaagccggauuguuugaa

SEQ ID NO: 28862 - RNA, 20 nt, Artificial Sequence
  HTT spacer sequence GTCN PAM
ucaaacaauccggcuuccca

SEQ ID NO: 28863 - RNA, 20 nt, Artificial Sequence
  HTT spacer sequence GTCN PAM
gcuaggugguugucucugcu

SEQ ID NO: 28864 - RNA, 20 nt, Artificial Sequence
  HTT spacer sequence GTCN PAM
cugcuuuuugaaaaagaagu

SEQ ID NO: 28865 - RNA, 20 nt, Artificial Sequence
  HTT spacer sequence GTCN PAM
ccgcccgacccccgccccgc

SEQ ID NO: 28866 - RNA, 20 nt, Artificial Sequence
  HTT spacer sequence GTCN PAM
ggcggggacuucuuuuucaa

SEQ ID NO: 28867 - RNA, 20 nt, Artificial Sequence
  HTT spacer sequence GTCN PAM
gagcgucugagcccagaugg

SEQ ID NO: 28868 - RNA, 20 nt, Artificial Sequence
  HTT spacer sequence GTCN PAM
gagcccagauggugcgcuug

SEQ ID NO: 28869 - RNA, 20 nt, Artificial Sequence
  HTT spacer sequence GTCN PAM
cgcggcggccacuggagccg

SEQ ID NO: 28870 - RNA, 20 nt, Artificial Sequence
  HTT spacer sequence GTCN PAM
ccggugucgccgcccugccc

SEQ ID NO: 28871 - RNA, 20 nt, Artificial Sequence
  HTT spacer sequence GTCN PAM
ccgcccugcccgcgggcccg

SEQ ID NO: 28872 - RNA, 20 nt, Artificial Sequence
  HTT spacer sequence GTCN PAM
cuuucaaaauagcucgcagg

SEQ ID NO: 28873 - RNA, 20 nt, Artificial Sequence
  HTT spacer sequence GTCN PAM
ugguuccgcgccgccgcgcu

SEQ ID NO: 28874 - RNA, 20 nt, Artificial Sequence
  HTT spacer sequence GTCN PAM
ucuucugucaugguuccgcg

SEQ ID NO: 28875 - RNA, 20 nt, Artificial Sequence
  HTT spacer sequence GTCN PAM
agcugcgggacggcaagaag

SEQ ID NO: 28876 - RNA, 20 nt, Artificial Sequence
  HTT spacer sequence GTCN PAM
cgcagcuugaccuggcccuc

SEQ ID NO: 28877 - RNA, 20 nt, Artificial Sequence
  HTT spacer sequence GTCN PAM
gggcgcgucgggggcgcggg

SEQ ID NO: 28878 - RNA, 20 nt, Artificial Sequence
  HTT spacer sequence GTCN PAM
ggggcgcggggggggggggc

SEQ ID NO: 28879 - RNA, 20 nt, Artificial Sequence
  HTT spacer sequence GTCN PAM
ccgcaguggaagaguaggug

SEQ ID NO: 28880 - RNA, 20 nt, Artificial Sequence
  HTT spacer sequence GTCN PAM
cccguggcaggugagcgggg

SEQ ID NO: 28881 - RNA, 20 nt, Artificial Sequence
  HTT spacer sequence GTCN PAM
cccgcccgccccgcucaccu

SEQ ID NO: 28882 - RNA, 20 nt, Artificial Sequence
  HTT spacer sequence GTCN PAM
cuacccccgcgccccccguc

SEQ ID NO: 28883 - RNA, 20 nt, Artificial Sequence
  HTT spacer sequence GTCN PAM
ccccgccgggaaacccgaga

SEQ ID NO: 28884 - RNA, 20 nt, Artificial Sequence
  HTT spacer sequence GTCN PAM
gcacggggcucucggguuuc

SEQ ID NO: 28885 - RNA, 20 nt, Artificial Sequence
  HTT spacer sequence GTCN PAM
ggguccgcacggggcucucg

SEQ ID NO: 28886 - RNA, 20 nt, Artificial Sequence
  HTT spacer sequence GTCN PAM
agggcccccaccugcgcucc

SEQ ID NO: 28887 - RNA, 20 nt, Artificial Sequence
  HTT spacer sequence GTCN PAM
gcccugcuggaaagaggguu

SEQ ID NO: 28888 - RNA, 20 nt, Artificial Sequence
  HTT spacer sequence GTCN PAM
ccuccgccuacagggccacc

SEQ ID NO: 28889 - RNA, 20 nt, Artificial Sequence
  HTT spacer sequence GTCN PAM
gcgcuaacccacgcagcacc

SEQ ID NO: 28890 - RNA, 20 nt, Artificial Sequence
  HTT spacer sequence GTCN PAM
agggucagcgcuaacccacg

SEQ ID NO: 28891 - RNA, 20 nt, Artificial Sequence
  HTT spacer sequence GTCN PAM
gccugggagggguccagggu

SEQ ID NO: 28892 - RNA, 20 nt, Artificial Sequence
  HTT spacer sequence GTCN PAM
cucugcccugcccuaccgca

SEQ ID NO: 28893 - RNA, 20 nt, Artificial Sequence
  HTT spacer sequence GTCN PAM
ucugggaggaggcagggguc

SEQ ID NO: 28894 - RNA, 20 nt, Artificial Sequence
  HTT spacer sequence GTCN PAM
ccccccaguccccgcccuga

SEQ ID NO: 28895 - RNA, 20 nt, Artificial Sequence
  HTT spacer sequence GTCN PAM
ccgcccugagccagcacccc

SEQ ID NO: 28896 - RNA, 20 nt, Artificial Sequence
  HTT spacer sequence GTCN PAM
gcauggagcccccaggucug

SEQ ID NO: 28897 - RNA, 20 nt, Artificial Sequence
  HTT spacer sequence GTCN PAM
ggcagcccaggccgccugca

SEQ ID NO: 28898 - RNA, 20 nt, Artificial Sequence
  HTT spacer sequence GTCN PAM
ucuggagcagcugcaggccc

SEQ ID NO: 28899 - RNA, 20 nt, Artificial Sequence
  HTT spacer sequence GTCN PAM
gggugggaugcucggccugu

SEQ ID NO: 28900 - RNA, 20 nt, Artificial Sequence
  HTT spacer sequence GTCN PAM
uggagggugcucuggcagcc

SEQ ID NO: 28901 - RNA, 20 nt, Artificial Sequence
  HTT spacer sequence GTCN PAM
gugacucccagggagggugu

SEQ ID NO: 28902 - RNA, 20 nt, Artificial Sequence
  HTT spacer sequence GTCN PAM
cagacacccguccuggaggg

SEQ ID NO: 28903 - RNA, 20 nt, Artificial Sequence
  HTT spacer sequence GTCN PAM
ccucugcagggccucaggug

SEQ ID NO: 28904 - RNA, 20 nt, Artificial Sequence
  HTT spacer sequence GTCN PAM
uggaggaaagcacuuccugc

SEQ ID NO: 28905 - RNA, 20 nt, Artificial Sequence
  HTT spacer sequence GTCN PAM
aggcccugcaaggggaggcg

SEQ ID NO: 28906 - RNA, 20 nt, Artificial Sequence
  HTT spacer sequence GTCN PAM
cuucuccacucagcccuccg

SEQ ID NO: 28907 - RNA, 20 nt, Artificial Sequence
  HTT spacer sequence GTCN PAM
gggcacggagggcugagugg

SEQ ID NO: 28908 - RNA, 20 nt, Artificial Sequence
  HTT spacer sequence GTCN PAM
gugcccccacagcuccaggc

SEQ ID NO: 28909 - RNA, 20 nt, Artificial Sequence
  HTT spacer sequence GTCN PAM
uuguccuccggggcugcagg

SEQ ID NO: 28910 - RNA, 20 nt, Artificial Sequence
  HTT spacer sequence GTCN PAM
uccggggcugcaggggaccu

SEQ ID NO: 28911 - RNA, 20 nt, Artificial Sequence
  HTT spacer sequence GTCN PAM
ccugcagccccggaggacaa

SEQ ID NO: 28912 - RNA, 20 nt, Artificial Sequence
  HTT spacer sequence GTCN PAM
gggcagagugagaggcccug

SEQ ID NO: 28913 - RNA, 20 nt, Artificial Sequence
  HTT spacer sequence GTCN PAM
uccgccccagccuggcaggg

SEQ ID NO: 28914 - RNA, 20 nt, Artificial Sequence
  HTT spacer sequence GTCN PAM
gcuguggcugggucggggcc

SEQ ID NO: 28915 - RNA, 20 nt, Artificial Sequence
  HTT spacer sequence GTCN PAM
gggccgugguggggcaggug

SEQ ID NO: 28916 - RNA, 20 nt, Artificial Sequence
  HTT spacer sequence GTCN PAM
gcaccggcuccagcccagca

SEQ ID NO: 28917 - RNA, 20 nt, Artificial Sequence
  HTT spacer sequence GTCN PAM
cgggugccuuccugggaugc

SEQ ID NO: 28918 - RNA, 20 nt, Artificial Sequence
  HTT spacer sequence GTCN PAM
ggggagaagucuuugucccu

SEQ ID NO: 28919 - RNA, 20 nt, Artificial Sequence
  HTT spacer sequence GTCN PAM
uugucccuguuggagggauu

SEQ ID NO: 28920 - RNA, 20 nt, Artificial Sequence
  HTT spacer sequence GTCN PAM
cuguuggagggauuuucuuu

SEQ ID NO: 28921 - RNA, 20 nt, Artificial Sequence
  HTT spacer sequence GTCN PAM
gaugcagaaagaaaaucccu

SEQ ID NO: 28922 - RNA, 20 nt, Artificial Sequence
  HTT spacer sequence GTCN PAM
caggaggcagggccugccag

SEQ ID NO: 28923 - RNA, 20 nt, Artificial Sequence
  HTT spacer sequence GTCN PAM
cuccacucaggcacucaccg

SEQ ID NO: 28924 - RNA, 20 nt, Artificial Sequence
  HTT spacer sequence GTCN PAM
cccaggugggacaaucugug

SEQ ID NO: 28925 - RNA, 20 nt, Artificial Sequence
  HTT spacer sequence GTCN PAM
caccugggggacccauugca

SEQ ID NO: 28926 - RNA, 20 nt, Artificial Sequence
  HTT spacer sequence GTCN PAM
guaggugaacaugguggcuc

SEQ ID NO: 28927 - RNA, 20 nt, Artificial Sequence
  HTT spacer sequence GTCN PAM
gcuggguuaucccguauccu

SEQ ID NO: 28928 - RNA, 20 nt, Artificial Sequence
  HTT spacer sequence GTCN PAM
cuagcacccacugacucacu

SEQ ID NO: 28929 - RNA, 20 nt, Artificial Sequence
  HTT spacer sequence GTCN PAM
gugggugcuagggacaccug

SEQ ID NO: 28930 - RNA, 20 nt, Artificial Sequence
  HTT spacer sequence GTCN PAM
caggccagugagucaguggg

SEQ ID NO: 28931 - RNA, 20 nt, Artificial Sequence
  HTT spacer sequence GTCN PAM
aaagcaaugggucccaggcc

SEQ ID NO: 28932 - RNA, 20 nt, Artificial Sequence
  HTT spacer sequence GTCN PAM
cuccagcagcccaggguuga

SEQ ID NO: 28933 - RNA, 20 nt, Artificial Sequence
  HTT spacer sequence GTCN PAM
guuucaacccugggcugcug

SEQ ID NO: 28934 - RNA, 20 nt, Artificial Sequence
  HTT spacer sequence GTCN PAM
gucagaugaggggaugggac

SEQ ID NO: 28935 - RNA, 20 nt, Artificial Sequence
  HTT spacer sequence GTCN PAM
gaugaggggaugggacagag

SEQ ID NO: 28936 - RNA, 20 nt, Artificial Sequence
  HTT spacer sequence GTCN PAM
cauccccucaucugaccgac

SEQ ID NO: 28937 - RNA, 20 nt, Artificial Sequence
  HTT spacer sequence GTCN PAM
ggguggggaggugggcguga

SEQ ID NO: 28938 - RNA, 20 nt, Artificial Sequence
  HTT spacer sequence GTCN PAM
ccagcgcugagcgggaaggc

SEQ ID NO: 28939 - RNA, 20 nt, Artificial Sequence
  HTT spacer sequence GTCN PAM
gcuccuccagggcuggggcc

SEQ ID NO: 28940 - RNA, 20 nt, Artificial Sequence
  HTT spacer sequence GTCN PAM
gugcugucugcuccuccagg

SEQ ID NO: 28941 - RNA, 20 nt, Artificial Sequence
  HTT spacer sequence GTCN PAM
cgucugcuuccuuguaagac

SEQ ID NO: 28942 - RNA, 20 nt, Artificial Sequence
  HTT spacer sequence GTCN PAM
gcuuccuuguaagacaggca

SEQ ID NO: 28943 - RNA, 20 nt, Artificial Sequence
  HTT spacer sequence GTCN PAM
uacaaggaagcagacgggac

SEQ ID NO: 28944 - RNA, 20 nt, Artificial Sequence
  HTT spacer sequence GTCN PAM
uucuguuaugacaagguuua

SEQ ID NO: 28945 - RNA, 20 nt, Artificial Sequence
  HTT spacer sequence GTCN PAM
uaacagaaagacgugcucac

SEQ ID NO: 28946 - RNA, 20 nt, Artificial Sequence
  HTT spacer sequence GTCN PAM
acuggccaugccaggcgcug

SEQ ID NO: 28947 - RNA, 20 nt, Artificial Sequence
  HTT spacer sequence GTCN PAM
ggccgucugccucggugugg

SEQ ID NO: 28948 - RNA, 20 nt, Artificial Sequence
  HTT spacer sequence GTCN PAM
gccucggugugggacugcag

SEQ ID NO: 28949 - RNA, 20 nt, Artificial Sequence
  HTT spacer sequence GTCN PAM
cacaccgaggcagacggccc

SEQ ID NO: 28950 - RNA, 20 nt, Artificial Sequence
  HTT spacer sequence GTCN PAM
cacugcagggcacccugcag

SEQ ID NO: 28951 - RNA, 20 nt, Artificial Sequence
  HTT spacer sequence GTCN PAM
ccaccgcguccucacugcgg

SEQ ID NO: 28952 - RNA, 20 nt, Artificial Sequence
  HTT spacer sequence GTCN PAM
ucacugcggaaugcgugucu

SEQ ID NO: 28953 - RNA, 20 nt, Artificial Sequence
  HTT spacer sequence GTCN PAM
gcguccccucucugggcagg

SEQ ID NO: 28954 - RNA, 20 nt, Artificial Sequence
  HTT spacer sequence GTCN PAM
ccucucugggcagggccccg

SEQ ID NO: 28955 - RNA, 20 nt, Artificial Sequence
  HTT spacer sequence GTCN PAM
guguccaguuguggcccagg

SEQ ID NO: 28956 - RNA, 20 nt, Artificial Sequence
  HTT spacer sequence GTCN PAM
aguuguggcccaggacucac

SEQ ID NO: 28957 - RNA, 20 nt, Artificial Sequence
  HTT spacer sequence GTCN PAM
ugggccacaacuggacacag

SEQ ID NO: 28958 - RNA, 20 nt, Artificial Sequence
  HTT spacer sequence GTCN PAM
agaacacuuuccucaccacc

SEQ ID NO: 28959 - RNA, 20 nt, Artificial Sequence
  HTT spacer sequence GTCN PAM
ggccuggggccacacucucc

SEQ ID NO: 28960 - RNA, 20 nt, Artificial Sequence
  HTT spacer sequence GTCN PAM
uggagcuggcagggucuugg

SEQ ID NO: 28961 - RNA, 20 nt, Artificial Sequence
  HTT spacer sequence GTCN PAM
uggagucaccaugguggggg

SEQ ID NO: 28962 - RNA, 20 nt, Artificial Sequence
  HTT spacer sequence GTCN PAM
ccaugguggggggaagcuga

SEQ ID NO: 28963 - RNA, 20 nt, Artificial Sequence
  HTT spacer sequence GTCN PAM
ugggccagaucccucggguu

SEQ ID NO: 28964 - RNA, 20 nt, Artificial Sequence
  HTT spacer sequence GTCN PAM
augucuugggccagaucccu

SEQ ID NO: 28965 - RNA, 20 nt, Artificial Sequence
  HTT spacer sequence GTCN PAM
ccccuauccuugcucucggu

SEQ ID NO: 28966 - RNA, 20 nt, Artificial Sequence
  HTT spacer sequence GTCN PAM
caccgagagcaaggauaggg

SEQ ID NO: 28967 - RNA, 20 nt, Artificial Sequence
  HTT spacer sequence GTCN PAM
cuccugcaggccgggcucag

SEQ ID NO: 28968 - RNA, 20 nt, Artificial Sequence
  HTT spacer sequence GTCN PAM
ccguggggucccuccugcag

SEQ ID NO: 28969 - RNA, 20 nt, Artificial Sequence
  HTT spacer sequence GTCN PAM
uggggcccugcccuccacag

SEQ ID NO: 28970 - RNA, 20 nt, Artificial Sequence
  HTT spacer sequence GTCN PAM
acccccagccccucguuagc

SEQ ID NO: 28971 - RNA, 20 nt, Artificial Sequence
  HTT spacer sequence GTCN PAM
gcccuuccugagcagagccu

SEQ ID NO: 28972 - RNA, 20 nt, Artificial Sequence
  HTT spacer sequence GTCN PAM
ggcuccugccccaacggacu

SEQ ID NO: 28973 - RNA, 20 nt, Artificial Sequence
  HTT spacer sequence GTCN PAM
guuggggcaggagccagacg

SEQ ID NO: 28974 - RNA, 20 nt, Artificial Sequence
  HTT spacer sequence GTCN PAM
gccccaguccguuggggcag

SEQ ID NO: 28975 - RNA, 20 nt, Artificial Sequence
  HTT spacer sequence GTCN PAM
ucagcccggagcugggaugu

SEQ ID NO: 28976 - RNA, 20 nt, Artificial Sequence
  HTT spacer sequence GTCN PAM
cccuguucuugauguuucua

SEQ ID NO: 28977 - RNA, 20 nt, Artificial Sequence
  HTT spacer sequence GTCN PAM
ggacagggaaucagagagcu

SEQ ID NO: 28978 - RNA, 20 nt, Artificial Sequence
  HTT spacer sequence GTCN PAM
ugacgcgggggcugagggaa

SEQ ID NO: 28979 - RNA, 20 nt, Artificial Sequence
  HTT spacer sequence GTCN PAM
cugcucccacauguggagcu

SEQ ID NO: 28980 - RNA, 20 nt, Artificial Sequence
  HTT spacer sequence GTCN PAM
caggucacugcucccacaug

SEQ ID NO: 28981 - RNA, 20 nt, Artificial Sequence
  HTT spacer sequence GTCN PAM
ucgucuacucacagggcucu

SEQ ID NO: 28982 - RNA, 20 nt, Artificial Sequence
  HTT spacer sequence GTCN PAM
acucacagggcucuugaggg

SEQ ID NO: 28983 - RNA, 20 nt, Artificial Sequence
  HTT spacer sequence GTCN PAM
ugggcugcccuuggugaugu

SEQ ID NO: 28984 - RNA, 20 nt, Artificial Sequence
  HTT spacer sequence GTCN PAM
guggucuggggggcccaccu

SEQ ID NO: 28985 - RNA, 20 nt, Artificial Sequence
  HTT spacer sequence TTCN PAM
aauuauuuuuagggauauca

SEQ ID NO: 28986 - RNA, 20 nt, Artificial Sequence
  HTT spacer sequence TTCN PAM
caaaaacugaaauccaaaga

SEQ ID NO: 28987 - RNA, 20 nt, Artificial Sequence
  HTT spacer sequence TTCN PAM
guuuuugagaauguuuccaa

SEQ ID NO: 28988 - RNA, 20 nt, Artificial Sequence
  HTT spacer sequence TTCN PAM
uuggauuucaguuuuugaga

SEQ ID NO: 28989 - RNA, 20 nt, Artificial Sequence
  HTT spacer sequence TTCN PAM
uggggagacugggcuagcac

SEQ ID NO: 28990 - RNA, 20 nt, Artificial Sequence
  HTT spacer sequence TTCN PAM
ggugggggagagccaagcgc

SEQ ID NO: 28991 - RNA, 20 nt, Artificial Sequence
  HTT spacer sequence TTCN PAM
uuguccauggaggggccccc

SEQ ID NO: 28992 - RNA, 20 nt, Artificial Sequence
  HTT spacer sequence TTCN PAM
ugcuggagggaggcaggggg

SEQ ID NO: 28993 - RNA, 20 nt, Artificial Sequence
  HTT spacer sequence TTCN PAM
cauuguuuuccugcuggagg

SEQ ID NO: 28994 - RNA, 20 nt, Artificial Sequence
  HTT spacer sequence TTCN PAM
auuucucauuguuuuccugc

SEQ ID NO: 28995 - RNA, 20 nt, Artificial Sequence
  HTT spacer sequence TTCN PAM
aaaugcuuacuguaagaagg

SEQ ID NO: 28996 - RNA, 20 nt, Artificial Sequence
  HTT spacer sequence TTCN PAM
uacaguaagcauuuugaagc

SEQ ID NO: 28997 - RNA, 20 nt, Artificial Sequence
  HTT spacer sequence TTCN PAM
uucuuacaguaagcauuuug

SEQ ID NO: 28998 - RNA, 20 nt, Artificial Sequence
  HTT spacer sequence TTCN PAM
auucauccuauccaacuauu

SEQ ID NO: 28999 - RNA, 20 nt, Artificial Sequence
  HTT spacer sequence TTCN PAM
uccuauccaacuauucuaca

SEQ ID NO: 29000 - RNA, 20 nt, Artificial Sequence
  HTT spacer sequence TTCN PAM
acauuaauuaccauaacaua

SEQ ID NO: 29001 - RNA, 20 nt, Artificial Sequence
  HTT spacer sequence TTCN PAM
auucuacuugugcuuaaucu

SEQ ID NO: 29002 - RNA, 20 nt, Artificial Sequence
  HTT spacer sequence TTCN PAM
acuugugcuuaaucuauuca

SEQ ID NO: 29003 - RNA, 20 nt, Artificial Sequence
  HTT spacer sequence TTCN PAM
gaucagucaaaaaauaucca

SEQ ID NO: 29004 - RNA, 20 nt, Artificial Sequence
  HTT spacer sequence TTCN PAM
cuuuugucuuccuccuucaa

SEQ ID NO: 29005 - RNA, 20 nt, Artificial Sequence
  HTT spacer sequence TTCN PAM
uccuucaaacacuugacuug

SEQ ID NO: 29006 - RNA, 20 nt, Artificial Sequence
  HTT spacer sequence TTCN PAM
aacacuugacuugcccauca

SEQ ID NO: 29007 - RNA, 20 nt, Artificial Sequence
  HTT spacer sequence TTCN PAM
guuggauugcaaaaaaaacu

SEQ ID NO: 29008 - RNA, 20 nt, Artificial Sequence
  HTT spacer sequence TTCN PAM
ccaaaugggacucauguaaa

SEQ ID NO: 29009 - RNA, 20 nt, Artificial Sequence
  HTT spacer sequence TTCN PAM
ugcaggaaaggagacuuugc

SEQ ID NO: 29010 - RNA, 20 nt, Artificial Sequence
  HTT spacer sequence TTCN PAM
ugcaggaaggcacuggacug

SEQ ID NO: 29011 - RNA, 20 nt, Artificial Sequence
  HTT spacer sequence TTCN PAM
uccuggcuguagagguucga

SEQ ID NO: 29012 - RNA, 20 nt, Artificial Sequence
  HTT spacer sequence TTCN PAM
agcaaggugacuugucuuga

SEQ ID NO: 29013 - RNA, 20 nt, Artificial Sequence
  HTT spacer sequence TTCN PAM
caaaugacccucacaccuca

SEQ ID NO: 29014 - RNA, 20 nt, Artificial Sequence
  HTT spacer sequence TTCN PAM
auccguuaaggcacugaggu

SEQ ID NO: 29015 - RNA, 20 nt, Artificial Sequence
  HTT spacer sequence TTCN PAM
ccgcugccacccgagcccug

SEQ ID NO: 29016 - RNA, 20 nt, Artificial Sequence
  HTT spacer sequence TTCN PAM
ccaugucggacuggccccca

SEQ ID NO: 29017 - RNA, 20 nt, Artificial Sequence
  HTT spacer sequence TTCN PAM
uccucagggggaccuguaac

SEQ ID NO: 29018 - RNA, 20 nt, Artificial Sequence
  HTT spacer sequence TTCN PAM
cagcaaccaaguacccgcca

SEQ ID NO: 29019 - RNA, 20 nt, Artificial Sequence
  HTT spacer sequence TTCN PAM
gguagguggcggguacuugg

SEQ ID NO: 29020 - RNA, 20 nt, Artificial Sequence
  HTT spacer sequence TTCN PAM
cucucagaauggccuggcug

SEQ ID NO: 29021 - RNA, 20 nt, Artificial Sequence
  HTT spacer sequence TTCN PAM
gagagugaaagcgucucagu

SEQ ID NO: 29022 - RNA, 20 nt, Artificial Sequence
  HTT spacer sequence TTCN PAM
uccagccaggccauucugag

SEQ ID NO: 29023 - RNA, 20 nt, Artificial Sequence
  HTT spacer sequence TTCN PAM
aguuccuccagccaggccau

SEQ ID NO: 29024 - RNA, 20 nt, Artificial Sequence
  HTT spacer sequence TTCN PAM
uggagucucagaggccauca

SEQ ID NO: 29025 - RNA, 20 nt, Artificial Sequence
  HTT spacer sequence TTCN PAM
ugucaguguuucuuggaguc

SEQ ID NO: 29026 - RNA, 20 nt, Artificial Sequence
  HTT spacer sequence TTCN PAM
guggaaguccccgccugcuu

SEQ ID NO: 29027 - RNA, 20 nt, Artificial Sequence
  HTT spacer sequence TTCN PAM
acagaaccaacguuuagcua

SEQ ID NO: 29028 - RNA, 20 nt, Artificial Sequence
  HTT spacer sequence TTCN PAM
gccauuauugacugggguca

SEQ ID NO: 29029 - RNA, 20 nt, Artificial Sequence
  HTT spacer sequence TTCN PAM
agaaggcaggucucagcauc

SEQ ID NO: 29030 - RNA, 20 nt, Artificial Sequence
  HTT spacer sequence TTCN PAM
ggaauuguugggagcaugug

SEQ ID NO: 29031 - RNA, 20 nt, Artificial Sequence
  HTT spacer sequence TTCN PAM
cuagugucagguggggaugc

SEQ ID NO: 29032 - RNA, 20 nt, Artificial Sequence
  HTT spacer sequence TTCN PAM
cgucccucccacaccugugc

SEQ ID NO: 29033 - RNA, 20 nt, Artificial Sequence
  HTT spacer sequence TTCN PAM
cagccaggcccuggagcucc

SEQ ID NO: 29034 - RNA, 20 nt, Artificial Sequence
  HTT spacer sequence TTCN PAM
gugguugccggucauguguc

SEQ ID NO: 29035 - RNA, 20 nt, Artificial Sequence
  HTT spacer sequence TTCN PAM
ugucuucagugguugccggu

SEQ ID NO: 29036 - RNA, 20 nt, Artificial Sequence
  HTT spacer sequence TTCN PAM
ccaguguuuucuugucuuca

SEQ ID NO: 29037 - RNA, 20 nt, Artificial Sequence
  HTT spacer sequence TTCN PAM
gugcuuccccaguguuuucu

SEQ ID NO: 29038 - RNA, 20 nt, Artificial Sequence
  HTT spacer sequence TTCN PAM
cagcauuuauuuuucuucaa

SEQ ID NO: 29039 - RNA, 20 nt, Artificial Sequence
  HTT spacer sequence TTCN PAM
ucaaauuggaaucagcucac

SEQ ID NO: 29040 - RNA, 20 nt, Artificial Sequence
  HTT spacer sequence TTCN PAM
aauuggaaucagcucaccau

SEQ ID NO: 29041 - RNA, 20 nt, Artificial Sequence
  HTT spacer sequence TTCN PAM
aauuugaagaaaaauaaaug

SEQ ID NO: 29042 - RNA, 20 nt, Artificial Sequence
  HTT spacer sequence TTCN PAM
ccuuugcacccggcacaccc

SEQ ID NO: 29043 - RNA, 20 nt, Artificial Sequence
  HTT spacer sequence TTCN PAM
cacauuuagagcaagcacau

SEQ ID NO: 29044 - RNA, 20 nt, Artificial Sequence
  HTT spacer sequence TTCN PAM
gggaauucuugguggcugaa

SEQ ID NO: 29045 - RNA, 20 nt, Artificial Sequence
  HTT spacer sequence TTCN PAM
cagaauaccggaugugcuug

SEQ ID NO: 29046 - RNA, 20 nt, Artificial Sequence
  HTT spacer sequence TTCN PAM
ugguggcugaaaauggccac

SEQ ID NO: 29047 - RNA, 20 nt, Artificial Sequence
  HTT spacer sequence TTCN PAM
gccaccaagaauucccagaa

SEQ ID NO: 29048 - RNA, 20 nt, Artificial Sequence
  HTT spacer sequence TTCN PAM
guggccauuuucagccacca

SEQ ID NO: 29049 - RNA, 20 nt, Artificial Sequence
  HTT spacer sequence TTCN PAM
accuuaagaggagagauggc

SEQ ID NO: 29050 - RNA, 20 nt, Artificial Sequence
  HTT spacer sequence TTCN PAM
cucccccgucugcccugccu

SEQ ID NO: 29051 - RNA, 20 nt, Artificial Sequence
  HTT spacer sequence TTCN PAM
cguaauugauauuuggacuc

SEQ ID NO: 29052 - RNA, 20 nt, Artificial Sequence
  HTT spacer sequence TTCN PAM
guuaaaugggcgagucagag

SEQ ID NO: 29053 - RNA, 20 nt, Artificial Sequence
  HTT spacer sequence TTCN PAM
aguaagcgcccagcccugcc

SEQ ID NO: 29054 - RNA, 20 nt, Artificial Sequence
  HTT spacer sequence TTCN PAM
cuggcagggcagggcugggc

SEQ ID NO: 29055 - RNA, 20 nt, Artificial Sequence
  HTT spacer sequence TTCN PAM
guuugugguugggggagugu

SEQ ID NO: 29056 - RNA, 20 nt, Artificial Sequence
  HTT spacer sequence TTCN PAM
ugcgcuuugcugagguuucu

SEQ ID NO: 29057 - RNA, 20 nt, Artificial Sequence
  HTT spacer sequence TTCN PAM
uaagaggccagggaguaggu

SEQ ID NO: 29058 - RNA, 20 nt, Artificial Sequence
  HTT spacer sequence TTCN PAM
acaaagccaccucaagagca

SEQ ID NO: 29059 - RNA, 20 nt, Artificial Sequence
  HTT spacer sequence TTCN PAM
acaucagcacucaggcugug

SEQ ID NO: 29060 - RNA, 20 nt, Artificial Sequence
  HTT spacer sequence TTCN PAM
uuuuuccacaucagcacuca

SEQ ID NO: 29061 - RNA, 20 nt, Artificial Sequence
  HTT spacer sequence TTCN PAM
gggagggguggcaugaccug

SEQ ID NO: 29062 - RNA, 20 nt, Artificial Sequence
  HTT spacer sequence TTCN PAM
gaauucagagaaccacacac

SEQ ID NO: 29063 - RNA, 20 nt, Artificial Sequence
  HTT spacer sequence TTCN PAM
gaaggcucuggggcuccccc

SEQ ID NO: 29064 - RNA, 20 nt, Artificial Sequence
  HTT spacer sequence TTCN PAM
gagaaccacacacagcugag

SEQ ID NO: 29065 - RNA, 20 nt, Artificial Sequence
  HTT spacer sequence TTCN PAM
cugaauucagaaggcucugg

SEQ ID NO: 29066 - RNA, 20 nt, Artificial Sequence
  HTT spacer sequence TTCN PAM
ugagcccccuccgugccagg

SEQ ID NO: 29067 - RNA, 20 nt, Artificial Sequence
  HTT spacer sequence TTCN PAM
ggaugcugcacaggcugagc

SEQ ID NO: 29068 - RNA, 20 nt, Artificial Sequence
  HTT spacer sequence TTCN PAM
agcagcucaccucagagaga

SEQ ID NO: 29069 - RNA, 20 nt, Artificial Sequence
  HTT spacer sequence TTCN PAM
cucugaggugagcugcugga

SEQ ID NO: 29070 - RNA, 20 nt, Artificial Sequence
  HTT spacer sequence TTCN PAM
gcugauaaacuccaagugcc

SEQ ID NO: 29071 - RNA, 20 nt, Artificial Sequence
  HTT spacer sequence TTCN PAM
uuuucagcugauaaacucca

SEQ ID NO: 29072 - RNA, 20 nt, Artificial Sequence
  HTT spacer sequence TTCN PAM
ucaguagccuggcuagaagu

SEQ ID NO: 29073 - RNA, 20 nt, Artificial Sequence
  HTT spacer sequence TTCN PAM
agccaggcuacugaugaauu

SEQ ID NO: 29074 - RNA, 20 nt, Artificial Sequence
  HTT spacer sequence TTCN PAM
agggacuugggauuugagug

SEQ ID NO: 29075 - RNA, 20 nt, Artificial Sequence
  HTT spacer sequence TTCN PAM
uuucccaggugacgcaaagc

SEQ ID NO: 29076 - RNA, 20 nt, Artificial Sequence
  HTT spacer sequence TTCN PAM
caggugacgcaaagcaggga

SEQ ID NO: 29077 - RNA, 20 nt, Artificial Sequence
  HTT spacer sequence TTCN PAM
cugcuuugcgucaccuggga

SEQ ID NO: 29078 - RNA, 20 nt, Artificial Sequence
  HTT spacer sequence TTCN PAM
aagccccagcuguauacuuc

SEQ ID NO: 29079 - RNA, 20 nt, Artificial Sequence
  HTT spacer sequence TTCN PAM
gggggaucucugucaucgcc

SEQ ID NO: 29080 - RNA, 20 nt, Artificial Sequence
  HTT spacer sequence TTCN PAM
ggaccaaacagauauaucca

SEQ ID NO: 29081 - RNA, 20 nt, Artificial Sequence
  HTT spacer sequence TTCN PAM
uuuccagggugccgccccuc

SEQ ID NO: 29082 - RNA, 20 nt, Artificial Sequence
  HTT spacer sequence TTCN PAM
agggugccgccccucucaac

SEQ ID NO: 29083 - RNA, 20 nt, Artificial Sequence
  HTT spacer sequence TTCN PAM
agggcccaugaccaaguggg

SEQ ID NO: 29084 - RNA, 20 nt, Artificial Sequence
  HTT spacer sequence TTCN PAM
agcccacuuggucaugggcc

SEQ ID NO: 29085 - RNA, 20 nt, Artificial Sequence
  HTT spacer sequence TTCN PAM
ggguuccagcccacuugguc

SEQ ID NO: 29086 - RNA, 20 nt, Artificial Sequence
  HTT spacer sequence TTCN PAM
gcucuuguuaacccagccuc

SEQ ID NO: 29087 - RNA, 20 nt, Artificial Sequence
  HTT spacer sequence TTCN PAM
ugcccuucggcucuuguuaa

SEQ ID NO: 29088 - RNA, 20 nt, Artificial Sequence
  HTT spacer sequence TTCN PAM
cacaaaacaugccagugggg

SEQ ID NO: 29089 - RNA, 20 nt, Artificial Sequence
  HTT spacer sequence TTCN PAM
uucauaaagcacacacaccc

SEQ ID NO: 29090 - RNA, 20 nt, Artificial Sequence
  HTT spacer sequence TTCN PAM
uaaagcacacacacccagca

SEQ ID NO: 29091 - RNA, 20 nt, Artificial Sequence
  HTT spacer sequence TTCN PAM
cuuggcaaaggccaugucau

SEQ ID NO: 29092 - RNA, 20 nt, Artificial Sequence
  HTT spacer sequence TTCN PAM
aggcccagauuagcgaugac

SEQ ID NO: 29093 - RNA, 20 nt, Artificial Sequence
  HTT spacer sequence TTCN PAM
uguaaacauuccaggcccag

SEQ ID NO: 29094 - RNA, 20 nt, Artificial Sequence
  HTT spacer sequence TTCN PAM
uuauaaaucugccuuacuga

SEQ ID NO: 29095 - RNA, 20 nt, Artificial Sequence
  HTT spacer sequence TTCN PAM
ccuacaaagcggggggacaa

SEQ ID NO: 29096 - RNA, 20 nt, Artificial Sequence
  HTT spacer sequence TTCN PAM
uguccccccgcuuuguagga

SEQ ID NO: 29097 - RNA, 20 nt, Artificial Sequence
  HTT spacer sequence TTCN PAM
gagugggggcuauuaaccuu

SEQ ID NO: 29098 - RNA, 20 nt, Artificial Sequence
  HTT spacer sequence TTCN PAM
cggagugcaagguugagcau

SEQ ID NO: 29099 - RNA, 20 nt, Artificial Sequence
  HTT spacer sequence TTCN PAM
cauguggcugguuaccaugc

SEQ ID NO: 29100 - RNA, 20 nt, Artificial Sequence
  HTT spacer sequence TTCN PAM
uccucaaagauggaaaacac

SEQ ID NO: 29101 - RNA, 20 nt, Artificial Sequence
  HTT spacer sequence TTCN PAM
aucuuugaggaggaauugac

SEQ ID NO: 29102 - RNA, 20 nt, Artificial Sequence
  HTT spacer sequence TTCN PAM
uccugagugauauuaauaug

SEQ ID NO: 29103 - RNA, 20 nt, Artificial Sequence
  HTT spacer sequence TTCN PAM
uggccaucaccaaagagcau

SEQ ID NO: 29104 - RNA, 20 nt, Artificial Sequence
  HTT spacer sequence TTCN PAM
cggcaugggggagagggacc

SEQ ID NO: 29105 - RNA, 20 nt, Artificial Sequence
  HTT spacer sequence TTCN PAM
caccuccuagugaccaggaa

SEQ ID NO: 29106 - RNA, 20 nt, Artificial Sequence
  HTT spacer sequence TTCN PAM
uggucacuaggaggugagaa

SEQ ID NO: 29107 - RNA, 20 nt, Artificial Sequence
  HTT spacer sequence TTCN PAM
agccaggucaaucaauagaa

SEQ ID NO: 29108 - RNA, 20 nt, Artificial Sequence
  HTT spacer sequence TTCN PAM
auugauugaccuggcuggaa

SEQ ID NO: 29109 - RNA, 20 nt, Artificial Sequence
  HTT spacer sequence TTCN PAM
ugcuugguuaugacuuucua

SEQ ID NO: 29110 - RNA, 20 nt, Artificial Sequence
  HTT spacer sequence TTCN PAM
gaugaagacaccaaccaugc

SEQ ID NO: 29111 - RNA, 20 nt, Artificial Sequence
  HTT spacer sequence TTCN PAM
ucugaaacaaaagucucagu

SEQ ID NO: 29112 - RNA, 20 nt, Artificial Sequence
  HTT spacer sequence TTCN PAM
aaagcauaaacucucuugaa

SEQ ID NO: 29113 - RNA, 20 nt, Artificial Sequence
  HTT spacer sequence TTCN PAM
agagaguuuaugcuuuagaa

SEQ ID NO: 29114 - RNA, 20 nt, Artificial Sequence
  HTT spacer sequence TTCN PAM
uuaaagucuuuucaagagag

SEQ ID NO: 29115 - RNA, 20 nt, Artificial Sequence
  HTT spacer sequence TTCN PAM
ugccuuucuuuaaagucuuu

SEQ ID NO: 29116 - RNA, 20 nt, Artificial Sequence
  HTT spacer sequence TTCN PAM
ccaacaucaauaaagcagga

SEQ ID NO: 29117 - RNA, 20 nt, Artificial Sequence
  HTT spacer sequence TTCN PAM
ugcaccgucucuuccuggga

SEQ ID NO: 29118 - RNA, 20 nt, Artificial Sequence
  HTT spacer sequence TTCN PAM
ugggaguguucaaagucagg

SEQ ID NO: 29119 - RNA, 20 nt, Artificial Sequence
  HTT spacer sequence TTCN PAM
aagucaggauaauacuuaca

SEQ ID NO: 29120 - RNA, 20 nt, Artificial Sequence
  HTT spacer sequence TTCN PAM
gaucuuguaaguauuauccu

SEQ ID NO: 29121 - RNA, 20 nt, Artificial Sequence
  HTT spacer sequence TTCN PAM
ugguauaaaguguucagauc

SEQ ID NO: 29122 - RNA, 20 nt, Artificial Sequence
  HTT spacer sequence TTCN PAM
uaaucagucuuuuaaacacc

SEQ ID NO: 29123 - RNA, 20 nt, Artificial Sequence
  HTT spacer sequence TTCN PAM
cuuucuuaaucagucuuuua

SEQ ID NO: 29124 - RNA, 20 nt, Artificial Sequence
  HTT spacer sequence TTCN PAM
auucacuuucuuaaucaguc

SEQ ID NO: 29125 - RNA, 20 nt, Artificial Sequence
  HTT spacer sequence TTCN PAM
ccugccuuagccucccgagu

SEQ ID NO: 29126 - RNA, 20 nt, Artificial Sequence
  HTT spacer sequence TTCN PAM
aguaauucuccugccuuagc

SEQ ID NO: 29127 - RNA, 20 nt, Artificial Sequence
  HTT spacer sequence TTCN PAM
uuuuuuuuuuuuuugagaca

SEQ ID NO: 29128 - RNA, 20 nt, Artificial Sequence
  HTT spacer sequence TTCN PAM
uuucuuuuuuuuuuuuuuug

SEQ ID NO: 29129 - RNA, 20 nt, Artificial Sequence
  HTT spacer sequence TTCN PAM
uuucuuuucuuuuuuuuuuu

SEQ ID NO: 29130 - RNA, 20 nt, Artificial Sequence
  HTT spacer sequence TTCN PAM
cccacauuauccuccugagu

SEQ ID NO: 29131 - RNA, 20 nt, Artificial Sequence
  HTT spacer sequence TTCN PAM
agaccagccugggcaucaca

SEQ ID NO: 29132 - RNA, 20 nt, Artificial Sequence
  HTT spacer sequence TTCN PAM
ucucugaacuucccuaccuu

SEQ ID NO: 29133 - RNA, 20 nt, Artificial Sequence
  HTT spacer sequence TTCN PAM
gagaggaagcccuuuuagca

SEQ ID NO: 29134 - RNA, 20 nt, Artificial Sequence
  HTT spacer sequence TTCN PAM
cuaccuuucuucuguuuccc

SEQ ID NO: 29135 - RNA, 20 nt, Artificial Sequence
  HTT spacer sequence TTCN PAM
ucuguuucccugggcuaggg

SEQ ID NO: 29136 - RNA, 20 nt, Artificial Sequence
  HTT spacer sequence TTCN PAM
guuucccugggcuagggcuc

SEQ ID NO: 29137 - RNA, 20 nt, Artificial Sequence
  HTT spacer sequence TTCN PAM
cugggcuagggcuccauguu

SEQ ID NO: 29138 - RNA, 20 nt, Artificial Sequence
  HTT spacer sequence TTCN PAM
ugguccccgggucucccaau

SEQ ID NO: 29139 - RNA, 20 nt, Artificial Sequence
  HTT spacer sequence TTCN PAM
aggguagcucccucaacacc

SEQ ID NO: 29140 - RNA, 20 nt, Artificial Sequence
  HTT spacer sequence TTCN PAM
caagccaggagcgucucccu

SEQ ID NO: 29141 - RNA, 20 nt, Artificial Sequence
  HTT spacer sequence TTCN PAM
ggucucucagaucuacuggu

SEQ ID NO: 29142 - RNA, 20 nt, Artificial Sequence
  HTT spacer sequence TTCN PAM
cuacuuauuuuugauuuuaa

SEQ ID NO: 29143 - RNA, 20 nt, Artificial Sequence
  HTT spacer sequence TTCN PAM
uaaacuggcacuuggacuua

SEQ ID NO: 29144 - RNA, 20 nt, Artificial Sequence
  HTT spacer sequence TTCN PAM
aaacucaaguauaugucuca

SEQ ID NO: 29145 - RNA, 20 nt, Artificial Sequence
  HTT spacer sequence TTCN PAM
gccucugagcagaucuguuu

SEQ ID NO: 29146 - RNA, 20 nt, Artificial Sequence
  HTT spacer sequence TTCN PAM
gggugacccuaggcugcacc

SEQ ID NO: 29147 - RNA, 20 nt, Artificial Sequence
  HTT spacer sequence TTCN PAM
uucuggaagcgggguaaccu

SEQ ID NO: 29148 - RNA, 20 nt, Artificial Sequence
  HTT spacer sequence TTCN PAM
ggaagcgggguaaccuuccu

SEQ ID NO: 29149 - RNA, 20 nt, Artificial Sequence
  HTT spacer sequence TTCN PAM
agaaugaauacauuuaucca

SEQ ID NO: 29150 - RNA, 20 nt, Artificial Sequence
  HTT spacer sequence TTCN PAM
uuaccaguuccgccaggacc

SEQ ID NO: 29151 - RNA, 20 nt, Artificial Sequence
  HTT spacer sequence TTCN PAM
gccaggaccugucgaauagu

SEQ ID NO: 29152 - RNA, 20 nt, Artificial Sequence
  HTT spacer sequence TTCN PAM
acagguccuggcggaacugg

SEQ ID NO: 29153 - RNA, 20 nt, Artificial Sequence
  HTT spacer sequence TTCN PAM
uauauuacagguacagagcu

SEQ ID NO: 29154 - RNA, 20 nt, Artificial Sequence
  HTT spacer sequence TTCN PAM
gacggcuaccucuggauccu

SEQ ID NO: 29155 - RNA, 20 nt, Artificial Sequence
  HTT spacer sequence TTCN PAM
cugauguucugacggcuacc

SEQ ID NO: 29156 - RNA, 20 nt, Artificial Sequence
  HTT spacer sequence TTCN PAM
caguagcugggaccacaggc

SEQ ID NO: 29157 - RNA, 20 nt, Artificial Sequence
  HTT spacer sequence TTCN PAM
agugauccuccuugcucagc

SEQ ID NO: 29158 - RNA, 20 nt, Artificial Sequence
  HTT spacer sequence TTCN PAM
aggcaagccugggcaacaua

SEQ ID NO: 29159 - RNA, 20 nt, Artificial Sequence
  HTT spacer sequence TTCN PAM
ucaaaaaagaaaaaaagacu

SEQ ID NO: 29160 - RNA, 20 nt, Artificial Sequence
  HTT spacer sequence TTCN PAM
aaaaagaaaaaaagacugga

SEQ ID NO: 29161 - RNA, 20 nt, Artificial Sequence
  HTT spacer sequence TTCN PAM
uuuuugaagaagacaggguc

SEQ ID NO: 29162 - RNA, 20 nt, Artificial Sequence
  HTT spacer sequence TTCN PAM
agucuuuuuuucuuuuuuga

SEQ ID NO: 29163 - RNA, 20 nt, Artificial Sequence
  HTT spacer sequence TTCN PAM
uccaacuuucgaaggaauuc

SEQ ID NO: 29164 - RNA, 20 nt, Artificial Sequence
  HTT spacer sequence TTCN PAM
aacuuucgaaggaauucaaa

SEQ ID NO: 29165 - RNA, 20 nt, Artificial Sequence
  HTT spacer sequence TTCN PAM
aaggaauucaaagccccuga

SEQ ID NO: 29166 - RNA, 20 nt, Artificial Sequence
  HTT spacer sequence TTCN PAM
aaaguuggaagaaugugcac

SEQ ID NO: 29167 - RNA, 20 nt, Artificial Sequence
  HTT spacer sequence TTCN PAM
uucgaaaguuggaagaaugu

SEQ ID NO: 29168 - RNA, 20 nt, Artificial Sequence
  HTT spacer sequence TTCN PAM
aagccccugaaaaaugaagg

SEQ ID NO: 29169 - RNA, 20 nt, Artificial Sequence
  HTT spacer sequence TTCN PAM
ggggcuuugaauuccuucga

SEQ ID NO: 29170 - RNA, 20 nt, Artificial Sequence
  HTT spacer sequence TTCN PAM
uuuuucaggggcuuugaauu

SEQ ID NO: 29171 - RNA, 20 nt, Artificial Sequence
  HTT spacer sequence TTCN PAM
cuucauuuuucaggggcuuu

SEQ ID NO: 29172 - RNA, 20 nt, Artificial Sequence
  HTT spacer sequence TTCN PAM
uuucccuucauuuuucaggg

SEQ ID NO: 29173 - RNA, 20 nt, Artificial Sequence
  HTT spacer sequence TTCN PAM
ucucauuugauuaguuuccc

SEQ ID NO: 29174 - RNA, 20 nt, Artificial Sequence
  HTT spacer sequence TTCN PAM
cucaaaaugaacuuucauuu

SEQ ID NO: 29175 - RNA, 20 nt, Artificial Sequence
  HTT spacer sequence TTCN PAM
uuuugagggaaacuaaucaa

SEQ ID NO: 29176 - RNA, 20 nt, Artificial Sequence
  HTT spacer sequence TTCN PAM
uuuuuggcauugcauagccu

SEQ ID NO: 29177 - RNA, 20 nt, Artificial Sequence
  HTT spacer sequence TTCN PAM
aggcuaugcaaugccaaaaa

SEQ ID NO: 29178 - RNA, 20 nt, Artificial Sequence
  HTT spacer sequence TTCN PAM
aaagagggagcaguucacau

SEQ ID NO: 29179 - RNA, 20 nt, Artificial Sequence
  HTT spacer sequence TTCN PAM
cugggugugguggugggcgc

SEQ ID NO: 29180 - RNA, 20 nt, Artificial Sequence
  HTT spacer sequence TTCN PAM
ccguguuagccggguggucu

SEQ ID NO: 29181 - RNA, 20 nt, Artificial Sequence
  HTT spacer sequence TTCN PAM
aucucaaaaaaaaaaaaaca

SEQ ID NO: 29182 - RNA, 20 nt, Artificial Sequence
  HTT spacer sequence TTCN PAM
gggagccgagaucaggccau

SEQ ID NO: 29183 - RNA, 20 nt, Artificial Sequence
  HTT spacer sequence TTCN PAM
ggcgauuccccugucucagc

SEQ ID NO: 29184 - RNA, 20 nt, Artificial Sequence
  HTT spacer sequence TTCN PAM
ccugucucagccucccgagu

SEQ ID NO: 29185 - RNA, 20 nt, Artificial Sequence
  HTT spacer sequence TTCN PAM
ccauguuggucgggcugguc

SEQ ID NO: 29186 - RNA, 20 nt, Artificial Sequence
  HTT spacer sequence TTCN PAM
agaccagcccgaccaacaug

SEQ ID NO: 29187 - RNA, 20 nt, Artificial Sequence
  HTT spacer sequence TTCN PAM
agcaauuaucccugccucag

SEQ ID NO: 29188 - RNA, 20 nt, Artificial Sequence
  HTT spacer sequence TTCN PAM
acuauuuaaaaauuauuuau

SEQ ID NO: 29189 - RNA, 20 nt, Artificial Sequence
  HTT spacer sequence TTCN PAM
gccucccaaagugcugagau

SEQ ID NO: 29190 - RNA, 20 nt, Artificial Sequence
  HTT spacer sequence TTCN PAM
ugacaagccugaucaacaua

SEQ ID NO: 29191 - RNA, 20 nt, Artificial Sequence
  HTT spacer sequence TTCN PAM
cuauguugaucaggcuuguc

SEQ ID NO: 29192 - RNA, 20 nt, Artificial Sequence
  HTT spacer sequence TTCN PAM
ccaguagcuaggauuacugg

SEQ ID NO: 29193 - RNA, 20 nt, Artificial Sequence
  HTT spacer sequence TTCN PAM
ccugccucagauuccccagu

SEQ ID NO: 29194 - RNA, 20 nt, Artificial Sequence
  HTT spacer sequence TTCN PAM
agugauucuccugccucaga

SEQ ID NO: 29195 - RNA, 20 nt, Artificial Sequence
  HTT spacer sequence TTCN PAM
acuauauauauauauauuuu

SEQ ID NO: 29196 - RNA, 20 nt, Artificial Sequence
  HTT spacer sequence TTCN PAM
uuuaugcuuuagugcuuuug

SEQ ID NO: 29197 - RNA, 20 nt, Artificial Sequence
  HTT spacer sequence TTCN PAM
agacaccaaaagcacuaaag

SEQ ID NO: 29198 - RNA, 20 nt, Artificial Sequence
  HTT spacer sequence TTCN PAM
cuuuacccaaggucaugagg

SEQ ID NO: 29199 - RNA, 20 nt, Artificial Sequence
  HTT spacer sequence TTCN PAM
cauuuaggucuauaauuaaa

SEQ ID NO: 29200 - RNA, 20 nt, Artificial Sequence
  HTT spacer sequence TTCN PAM
uuaauuauagaccuaaaugu

SEQ ID NO: 29201 - RNA, 20 nt, Artificial Sequence
  HTT spacer sequence TTCN PAM
ccccgguuuggguaucuagu

SEQ ID NO: 29202 - RNA, 20 nt, Artificial Sequence
  HTT spacer sequence TTCN PAM
guauuaacuucaauuuaaaa

SEQ ID NO: 29203 - RNA, 20 nt, Artificial Sequence
  HTT spacer sequence TTCN PAM
auuuaaaaggccauucuuuc

SEQ ID NO: 29204 - RNA, 20 nt, Artificial Sequence
  HTT spacer sequence TTCN PAM
uuccauaguauuguagaaug

SEQ ID NO: 29205 - RNA, 20 nt, Artificial Sequence
  HTT spacer sequence TTCN PAM
auaguauuguagaaugccau

SEQ ID NO: 29206 - RNA, 20 nt, Artificial Sequence
  HTT spacer sequence TTCN PAM
acaauacuauggaaagaaug

SEQ ID NO: 29207 - RNA, 20 nt, Artificial Sequence
  HTT spacer sequence TTCN PAM
uaccuugguuauaaauuuag

SEQ ID NO: 29208 - RNA, 20 nt, Artificial Sequence
  HTT spacer sequence TTCN PAM
auauuccuucgucuacuuuu

SEQ ID NO: 29209 - RNA, 20 nt, Artificial Sequence
  HTT spacer sequence TTCN PAM
uucgucuacuuuucuauccu

SEQ ID NO: 29210 - RNA, 20 nt, Artificial Sequence
  HTT spacer sequence TTCN PAM
ucuacuuuucuauccuugag

SEQ ID NO: 29211 - RNA, 20 nt, Artificial Sequence
  HTT spacer sequence TTCN PAM
auccuugagcggccaguacc

SEQ ID NO: 29212 - RNA, 20 nt, Artificial Sequence
  HTT spacer sequence TTCN PAM
gagagugugguacuggccgc

SEQ ID NO: 29213 - RNA, 20 nt, Artificial Sequence
  HTT spacer sequence TTCN PAM
caacaacaacaaaugcuaua

SEQ ID NO: 29214 - RNA, 20 nt, Artificial Sequence
  HTT spacer sequence TTCN PAM
agccugggcaacagagcaag

SEQ ID NO: 29215 - RNA, 20 nt, Artificial Sequence
  HTT spacer sequence TTCN PAM
caccucagccuccugagugg

SEQ ID NO: 29216 - RNA, 20 nt, Artificial Sequence
  HTT spacer sequence TTCN PAM
agaccgccugagcaacagag

SEQ ID NO: 29217 - RNA, 20 nt, Artificial Sequence
  HTT spacer sequence TTCN PAM
cccaagccucccaaagugcu

SEQ ID NO: 29218 - RNA, 20 nt, Artificial Sequence
  HTT spacer sequence TTCN PAM
guauuguucuucaugaaugu

SEQ ID NO: 29219 - RNA, 20 nt, Artificial Sequence
  HTT spacer sequence TTCN PAM
ucaugaauguuuugguuauu

SEQ ID NO: 29220 - RNA, 20 nt, Artificial Sequence
  HTT spacer sequence TTCN PAM
ugaauguuuugguuauucuu

SEQ ID NO: 29221 - RNA, 20 nt, Artificial Sequence
  HTT spacer sequence TTCN PAM
ugaagaacaauacagaacgc

SEQ ID NO: 29222 - RNA, 20 nt, Artificial Sequence
  HTT spacer sequence TTCN PAM
uggcccuuuauaauuuuaug

SEQ ID NO: 29223 - RNA, 20 nt, Artificial Sequence
  HTT spacer sequence TTCN PAM
cauaaagcacauaaaauuau

SEQ ID NO: 29224 - RNA, 20 nt, Artificial Sequence
  HTT spacer sequence TTCN PAM
guaucuuaguccguuugugu

SEQ ID NO: 29225 - RNA, 20 nt, Artificial Sequence
  HTT spacer sequence TTCN PAM
uuauagcaacacaaacggac

SEQ ID NO: 29226 - RNA, 20 nt, Artificial Sequence
  HTT spacer sequence TTCN PAM
gcaagcuguguaagaagcau

SEQ ID NO: 29227 - RNA, 20 nt, Artificial Sequence
  HTT spacer sequence TTCN PAM
uacacagcuugcagaaccag

SEQ ID NO: 29228 - RNA, 20 nt, Artificial Sequence
  HTT spacer sequence TTCN PAM
acuuacggcacaaggugaag

SEQ ID NO: 29229 - RNA, 20 nt, Artificial Sequence
  HTT spacer sequence TTCN PAM
ccuugugccguaaguggaaa

SEQ ID NO: 29230 - RNA, 20 nt, Artificial Sequence
  HTT spacer sequence TTCN PAM
cucaucaugucaucuggaca

SEQ ID NO: 29231 - RNA, 20 nt, Artificial Sequence
  HTT spacer sequence TTCN PAM
caucucucuugcuuuuucuc

SEQ ID NO: 29232 - RNA, 20 nt, Artificial Sequence
  HTT spacer sequence TTCN PAM
cugagagcuagcuguuaaaa

SEQ ID NO: 29233 - RNA, 20 nt, Artificial Sequence
  HTT spacer sequence TTCN PAM
auuaguucccugagagcuag

SEQ ID NO: 29234 - RNA, 20 nt, Artificial Sequence
  HTT spacer sequence TTCN PAM
cauuccauuaguucccugag

SEQ ID NO: 29235 - RNA, 20 nt, Artificial Sequence
  HTT spacer sequence TTCN PAM
agcacugagugaguucucau

SEQ ID NO: 29236 - RNA, 20 nt, Artificial Sequence
  HTT spacer sequence TTCN PAM
ugagggaccugcccucauga

SEQ ID NO: 29237 - RNA, 20 nt, Artificial Sequence
  HTT spacer sequence TTCN PAM
cauuaggcccaccuccagca

SEQ ID NO: 29238 - RNA, 20 nt, Artificial Sequence
  HTT spacer sequence TTCN PAM
ccucagacuccugagcagcu

SEQ ID NO: 29239 - RNA, 20 nt, Artificial Sequence
  HTT spacer sequence TTCN PAM
gggcucaagcgauccuuuca

SEQ ID NO: 29240 - RNA, 20 nt, Artificial Sequence
  HTT spacer sequence TTCN PAM
agacuagccuggcgaccuag

SEQ ID NO: 29241 - RNA, 20 nt, Artificial Sequence
  HTT spacer sequence TTCN PAM
agcuacuuggcagacugagg

SEQ ID NO: 29242 - RNA, 20 nt, Artificial Sequence
  HTT spacer sequence TTCN PAM
uuuauuuacauauuuugaga

SEQ ID NO: 29243 - RNA, 20 nt, Artificial Sequence
  HTT spacer sequence TTCN PAM
uuuucuuuuauuuacauauu

SEQ ID NO: 29244 - RNA, 20 nt, Artificial Sequence
  HTT spacer sequence TTCN PAM
aaauuuuuuucuuuuucuuu

SEQ ID NO: 29245 - RNA, 20 nt, Artificial Sequence
  HTT spacer sequence TTCN PAM
uuucaaaauuuuuuucuuuu

SEQ ID NO: 29246 - RNA, 20 nt, Artificial Sequence
  HTT spacer sequence TTCN PAM
gaguuguccaccccagcucu

SEQ ID NO: 29247 - RNA, 20 nt, Artificial Sequence
  HTT spacer sequence TTCN PAM
uucagaguuguccaccccag

SEQ ID NO: 29248 - RNA, 20 nt, Artificial Sequence
  HTT spacer sequence TTCN PAM
cugaaaaggaaggaaaagau

SEQ ID NO: 29249 - RNA, 20 nt, Artificial Sequence
  HTT spacer sequence TTCN PAM
gugaauuccuucagaguugu

SEQ ID NO: 29250 - RNA, 20 nt, Artificial Sequence
  HTT spacer sequence TTCN PAM
uuuucagugaauuccuucag

SEQ ID NO: 29251 - RNA, 20 nt, Artificial Sequence
  HTT spacer sequence TTCN PAM
uuccuuuucagugaauuccu

SEQ ID NO: 29252 - RNA, 20 nt, Artificial Sequence
  HTT spacer sequence TTCN PAM
cucacugccuaucuuuuccu

SEQ ID NO: 29253 - RNA, 20 nt, Artificial Sequence
  HTT spacer sequence TTCN PAM
gccccagcuucucucacugc

SEQ ID NO: 29254 - RNA, 20 nt, Artificial Sequence
  HTT spacer sequence TTCN PAM
ucagagugggagacagcaua

SEQ ID NO: 29255 - RNA, 20 nt, Artificial Sequence
  HTT spacer sequence TTCN PAM
gagugggagacagcauauuu

SEQ ID NO: 29256 - RNA, 20 nt, Artificial Sequence
  HTT spacer sequence TTCN PAM
auuaggaugcaaauaugcug

SEQ ID NO: 29257 - RNA, 20 nt, Artificial Sequence
  HTT spacer sequence TTCN PAM
ugcaucacuuccauuaggau

SEQ ID NO: 29258 - RNA, 20 nt, Artificial Sequence
  HTT spacer sequence TTCN PAM
uuccugcaucacuuccauua

SEQ ID NO: 29259 - RNA, 20 nt, Artificial Sequence
  HTT spacer sequence TTCN PAM
cuuucuuuccugcaucacuu

SEQ ID NO: 29260 - RNA, 20 nt, Artificial Sequence
  HTT spacer sequence TTCN PAM
cauaucaucacuuucucuuu

SEQ ID NO: 29261 - RNA, 20 nt, Artificial Sequence
  HTT spacer sequence TTCN PAM
guccucuucucauaucauca

SEQ ID NO: 29262 - RNA, 20 nt, Artificial Sequence
  HTT spacer sequence TTCN PAM
caaccagaccccacccuguc

SEQ ID NO: 29263 - RNA, 20 nt, Artificial Sequence
  HTT spacer sequence TTCN PAM
cagcucccacacauccgcag

SEQ ID NO: 29264 - RNA, 20 nt, Artificial Sequence
  HTT spacer sequence TTCN PAM
aaaagauugcuggugcucac

SEQ ID NO: 29265 - RNA, 20 nt, Artificial Sequence
  HTT spacer sequence TTCN PAM
cagacugcugaggguggugu

SEQ ID NO: 29266 - RNA, 20 nt, Artificial Sequence
  HTT spacer sequence TTCN PAM
uuuauacuccucagcacaga

SEQ ID NO: 29267 - RNA, 20 nt, Artificial Sequence
  HTT spacer sequence TTCN PAM
ucccuccugggcacccugcu

SEQ ID NO: 29268 - RNA, 20 nt, Artificial Sequence
  HTT spacer sequence TTCN PAM
cuccugggcacccugcuccg

SEQ ID NO: 29269 - RNA, 20 nt, Artificial Sequence
  HTT spacer sequence TTCN PAM
ucucaacuuccaucauuagg

SEQ ID NO: 29270 - RNA, 20 nt, Artificial Sequence
  HTT spacer sequence TTCN PAM
aucauuaggcucagggaccu

SEQ ID NO: 29271 - RNA, 20 nt, Artificial Sequence
  HTT spacer sequence TTCN PAM
cuguguccugccgugaaagu

SEQ ID NO: 29272 - RNA, 20 nt, Artificial Sequence
  HTT spacer sequence TTCN PAM
cggcaggacacagggaaagg

SEQ ID NO: 29273 - RNA, 20 nt, Artificial Sequence
  HTT spacer sequence TTCN PAM
ggugccucuuuaccuuaagu

SEQ ID NO: 29274 - RNA, 20 nt, Artificial Sequence
  HTT spacer sequence TTCN PAM
cauaauacaauguugauaaa

SEQ ID NO: 29275 - RNA, 20 nt, Artificial Sequence
  HTT spacer sequence TTCN PAM
auaaaaaagcaaguauugcc

SEQ ID NO: 29276 - RNA, 20 nt, Artificial Sequence
  HTT spacer sequence TTCN PAM
ggucacuuaauuuugagaug

SEQ ID NO: 29277 - RNA, 20 nt, Artificial Sequence
  HTT spacer sequence TTCN PAM
auguguugucucugaauaaa

SEQ ID NO: 29278 - RNA, 20 nt, Artificial Sequence
  HTT spacer sequence TTCN PAM
gagacaacacauggaauagg

SEQ ID NO: 29279 - RNA, 20 nt, Artificial Sequence
  HTT spacer sequence TTCN PAM
gccucuguucuauuuaagua

SEQ ID NO: 29280 - RNA, 20 nt, Artificial Sequence
  HTT spacer sequence TTCN PAM
auuuaaguaguuuuauuuuu

SEQ ID NO: 29281 - RNA, 20 nt, Artificial Sequence
  HTT spacer sequence TTCN PAM
cucuggucauuucuggguau

SEQ ID NO: 29282 - RNA, 20 nt, Artificial Sequence
  HTT spacer sequence TTCN PAM
ggguauugcuguaaagacug

SEQ ID NO: 29283 - RNA, 20 nt, Artificial Sequence
  HTT spacer sequence TTCN PAM
ggaccuucagagauugaagg

SEQ ID NO: 29284 - RNA, 20 nt, Artificial Sequence
  HTT spacer sequence TTCN PAM
gagauugaaggguuacaaac

SEQ ID NO: 29285 - RNA, 20 nt, Artificial Sequence
  HTT spacer sequence TTCN PAM
aucucugaagguccugaaaa

SEQ ID NO: 29286 - RNA, 20 nt, Artificial Sequence
  HTT spacer sequence TTCN PAM
cacacugcaguuuguaaccc

SEQ ID NO: 29287 - RNA, 20 nt, Artificial Sequence
  HTT spacer sequence TTCN PAM
uugccaaucuuuaaaguaaa

SEQ ID NO: 29288 - RNA, 20 nt, Artificial Sequence
  HTT spacer sequence TTCN PAM
aacauaccguucuuugccaa

SEQ ID NO: 29289 - RNA, 20 nt, Artificial Sequence
  HTT spacer sequence TTCN PAM
agcuguuuugcccuuuugcu

SEQ ID NO: 29290 - RNA, 20 nt, Artificial Sequence
  HTT spacer sequence TTCN PAM
ggcuccauacagcaaaaggg

SEQ ID NO: 29291 - RNA, 20 nt, Artificial Sequence
  HTT spacer sequence TTCN PAM
agucucuacauucaggcucc

SEQ ID NO: 29292 - RNA, 20 nt, Artificial Sequence
  HTT spacer sequence TTCN PAM
uaucccugcucugucauggg

SEQ ID NO: 29293 - RNA, 20 nt, Artificial Sequence
  HTT spacer sequence TTCN PAM
gaggcuggcucagauauuug

SEQ ID NO: 29294 - RNA, 20 nt, Artificial Sequence
  HTT spacer sequence TTCN PAM
ucuggauaaguagcaucaaa

SEQ ID NO: 29295 - RNA, 20 nt, Artificial Sequence
  HTT spacer sequence TTCN PAM
ggauaaguagcaucaaaaca

SEQ ID NO: 29296 - RNA, 20 nt, Artificial Sequence
  HTT spacer sequence TTCN PAM
uauacaaauguaguugccgu

SEQ ID NO: 29297 - RNA, 20 nt, Artificial Sequence
  HTT spacer sequence TTCN PAM
ccauguaauguuacuaaugu

SEQ ID NO: 29298 - RNA, 20 nt, Artificial Sequence
  HTT spacer sequence TTCN PAM
agcaaauaccacuaugccuu

SEQ ID NO: 29299 - RNA, 20 nt, Artificial Sequence
  HTT spacer sequence TTCN PAM
uuaaugccuuaaaaccaucu

SEQ ID NO: 29300 - RNA, 20 nt, Artificial Sequence
  HTT spacer sequence TTCN PAM
acagauguaaauaagauggu

SEQ ID NO: 29301 - RNA, 20 nt, Artificial Sequence
  HTT spacer sequence TTCN PAM
ggagcaaucauuaaaaacag

SEQ ID NO: 29302 - RNA, 20 nt, Artificial Sequence
  HTT spacer sequence TTCN PAM
uuagguuuucucuguuuauu

SEQ ID NO: 29303 - RNA, 20 nt, Artificial Sequence
  HTT spacer sequence TTCN PAM
cuguuuauucuaauauguaa

SEQ ID NO: 29304 - RNA, 20 nt, Artificial Sequence
  HTT spacer sequence TTCN PAM
aauauguaaacugaaauuaa

SEQ ID NO: 29305 - RNA, 20 nt, Artificial Sequence
  HTT spacer sequence TTCN PAM
guuuacauauuagaauaaac

SEQ ID NO: 29306 - RNA, 20 nt, Artificial Sequence
  HTT spacer sequence TTCN PAM
gaguucauucuuuaaaaaaa

SEQ ID NO: 29307 - RNA, 20 nt, Artificial Sequence
  HTT spacer sequence TTCN PAM
uucuuuaaaaaaaguaaguc

SEQ ID NO: 29308 - RNA, 20 nt, Artificial Sequence
  HTT spacer sequence TTCN PAM
uuaaaaaaaguaaguccuaa

SEQ ID NO: 29309 - RNA, 20 nt, Artificial Sequence
  HTT spacer sequence TTCN PAM
uuaggacuuacuuuuuuuaa

SEQ ID NO: 29310 - RNA, 20 nt, Artificial Sequence
  HTT spacer sequence TTCN PAM
acauuauuacagcauccuuu

SEQ ID NO: 29311 - RNA, 20 nt, Artificial Sequence
  HTT spacer sequence TTCN PAM
acagugacugauucuacauu

SEQ ID NO: 29312 - RNA, 20 nt, Artificial Sequence
  HTT spacer sequence TTCN PAM
auggaacagccuugaaauua

SEQ ID NO: 29313 - RNA, 20 nt, Artificial Sequence
  HTT spacer sequence TTCN PAM
auggaaacucaauaaaauuc

SEQ ID NO: 29314 - RNA, 20 nt, Artificial Sequence
  HTT spacer sequence TTCN PAM
aggcuguuccauggaaacuc

SEQ ID NO: 29315 - RNA, 20 nt, Artificial Sequence
  HTT spacer sequence TTCN PAM
guaaucuuacagaguaaaua

SEQ ID NO: 29316 - RNA, 20 nt, Artificial Sequence
  HTT spacer sequence TTCN PAM
cagugguuacaaagagauug

SEQ ID NO: 29317 - RNA, 20 nt, Artificial Sequence
  HTT spacer sequence TTCN PAM
cugagcaaaaggcauugccu

SEQ ID NO: 29318 - RNA, 20 nt, Artificial Sequence
  HTT spacer sequence TTCN PAM
caaagcauaugcagguucuc

SEQ ID NO: 29319 - RNA, 20 nt, Artificial Sequence
  HTT spacer sequence TTCN PAM
ggaaagaaagggugaaaagg

SEQ ID NO: 29320 - RNA, 20 nt, Artificial Sequence
  HTT spacer sequence TTCN PAM
ugaacucagcuuucccaaag

SEQ ID NO: 29321 - RNA, 20 nt, Artificial Sequence
  HTT spacer sequence TTCN PAM
uuccugaacucagcuuuccc

SEQ ID NO: 29322 - RNA, 20 nt, Artificial Sequence
  HTT spacer sequence TTCN PAM
cccuuucuuuccugaacuca

SEQ ID NO: 29323 - RNA, 20 nt, Artificial Sequence
  HTT spacer sequence TTCN PAM
cuggacuugagugcagguag

SEQ ID NO: 29324 - RNA, 20 nt, Artificial Sequence
  HTT spacer sequence TTCN PAM
ugaccucgugaucugccuac

SEQ ID NO: 29325 - RNA, 20 nt, Artificial Sequence
  HTT spacer sequence TTCN PAM
ucacgucggucaggcugauc

SEQ ID NO: 29326 - RNA, 20 nt, Artificial Sequence
  HTT spacer sequence TTCN PAM
ccugccucagccuccugagu

SEQ ID NO: 29327 - RNA, 20 nt, Artificial Sequence
  HTT spacer sequence TTCN PAM
agcaauucuccugccucagc

SEQ ID NO: 29328 - RNA, 20 nt, Artificial Sequence
  HTT spacer sequence TTCN PAM
uuuuuuuuuuuuuugagaca

SEQ ID NO: 29329 - RNA, 20 nt, Artificial Sequence
  HTT spacer sequence TTCN PAM
uucuuuuuuuuuuuuuuuga

SEQ ID NO: 29330 - RNA, 20 nt, Artificial Sequence
  HTT spacer sequence TTCN PAM
uucuuucuuuuuuuuuuuuu

SEQ ID NO: 29331 - RNA, 20 nt, Artificial Sequence
  HTT spacer sequence TTCN PAM
gcauuuuuauauaugauccu

SEQ ID NO: 29332 - RNA, 20 nt, Artificial Sequence
  HTT spacer sequence TTCN PAM
ccacguuggccaggaugguc

SEQ ID NO: 29333 - RNA, 20 nt, Artificial Sequence
  HTT spacer sequence TTCN PAM
aaugauccuccugccucagc

SEQ ID NO: 29334 - RNA, 20 nt, Artificial Sequence
  HTT spacer sequence TTCN PAM
agccuggugacagagcgaga

SEQ ID NO: 29335 - RNA, 20 nt, Artificial Sequence
  HTT spacer sequence TTCN PAM
guuuuuuaauuuuguuuugu

SEQ ID NO: 29336 - RNA, 20 nt, Artificial Sequence
  HTT spacer sequence TTCN PAM
guucccuuagcauuuacugg

SEQ ID NO: 29337 - RNA, 20 nt, Artificial Sequence
  HTT spacer sequence TTCN PAM
cuuagcauuuacugggcgcc

SEQ ID NO: 29338 - RNA, 20 nt, Artificial Sequence
  HTT spacer sequence TTCN PAM
uaauguugagugucuaaugg

SEQ ID NO: 29339 - RNA, 20 nt, Artificial Sequence
  HTT spacer sequence TTCN PAM
cauuagacacucaacauuau

SEQ ID NO: 29340 - RNA, 20 nt, Artificial Sequence
  HTT spacer sequence TTCN PAM
cauguccaucuucccauuag

SEQ ID NO: 29341 - RNA, 20 nt, Artificial Sequence
  HTT spacer sequence TTCN PAM
uuauacuacaaaauuaucuu

SEQ ID NO: 29342 - RNA, 20 nt, Artificial Sequence
  HTT spacer sequence TTCN PAM
uauagacuaucauauauuca

SEQ ID NO: 29343 - RNA, 20 nt, Artificial Sequence
  HTT spacer sequence TTCN PAM
acacuuccuauagacuauca

SEQ ID NO: 29344 - RNA, 20 nt, Artificial Sequence
  HTT spacer sequence TTCN PAM
ccauguuagccaggaugguc

SEQ ID NO: 29345 - RNA, 20 nt, Artificial Sequence
  HTT spacer sequence TTCN PAM
ccugccucagccuaccaagu

SEQ ID NO: 29346 - RNA, 20 nt, Artificial Sequence
  HTT spacer sequence TTCN PAM
agugauucuccugccucagc

SEQ ID NO: 29347 - RNA, 20 nt, Artificial Sequence
  HTT spacer sequence TTCN PAM
acacucuuuuuuuuuuuuug

SEQ ID NO: 29348 - RNA, 20 nt, Artificial Sequence
  HTT spacer sequence TTCN PAM
cagaauaaaaaaguuaccau

SEQ ID NO: 29349 - RNA, 20 nt, Artificial Sequence
  HTT spacer sequence TTCN PAM
gugaauuuugcucccuaccc

SEQ ID NO: 29350 - RNA, 20 nt, Artificial Sequence
  HTT spacer sequence TTCN PAM
aaccccacuaugguaacuuu

SEQ ID NO: 29351 - RNA, 20 nt, Artificial Sequence
  HTT spacer sequence TTCN PAM
uuuacaagacaacugcgagg

SEQ ID NO: 29352 - RNA, 20 nt, Artificial Sequence
  HTT spacer sequence TTCN PAM
cuaaaacaccaaucuccccg

SEQ ID NO: 29353 - RNA, 20 nt, Artificial Sequence
  HTT spacer sequence TTCN PAM
uacuugcugcuugcuucccu

SEQ ID NO: 29354 - RNA, 20 nt, Artificial Sequence
  HTT spacer sequence TTCN PAM
ugccuucauacuugcugcuu

SEQ ID NO: 29355 - RNA, 20 nt, Artificial Sequence
  HTT spacer sequence TTCN PAM
acacucccgccccaaccaac

SEQ ID NO: 29356 - RNA, 20 nt, Artificial Sequence
  HTT spacer sequence TTCN PAM
agugggugauuuugcaagaa

SEQ ID NO: 29357 - RNA, 20 nt, Artificial Sequence
  HTT spacer sequence TTCN PAM
ugcaaaaucacccacuugaa

SEQ ID NO: 29358 - RNA, 20 nt, Artificial Sequence
  HTT spacer sequence TTCN PAM
ugcugccuaaaaagaucaag

SEQ ID NO: 29359 - RNA, 20 nt, Artificial Sequence
  HTT spacer sequence TTCN PAM
auuguuccugcugccuaaaa

SEQ ID NO: 29360 - RNA, 20 nt, Artificial Sequence
  HTT spacer sequence TTCN PAM
cugccuuaaacccuucgauu

SEQ ID NO: 29361 - RNA, 20 nt, Artificial Sequence
  HTT spacer sequence TTCN PAM
ggucauagguacagugugag

SEQ ID NO: 29362 - RNA, 20 nt, Artificial Sequence
  HTT spacer sequence TTCN PAM
gggcugucugcuccccacau

SEQ ID NO: 29363 - RNA, 20 nt, Artificial Sequence
  HTT spacer sequence TTCN PAM
uagggcggucuaaucugggu

SEQ ID NO: 29364 - RNA, 20 nt, Artificial Sequence
  HTT spacer sequence TTCN PAM
ucauguuuauaagaaguuua

SEQ ID NO: 29365 - RNA, 20 nt, Artificial Sequence
  HTT spacer sequence TTCN PAM
uguuuauaagaaguuuaucu

SEQ ID NO: 29366 - RNA, 20 nt, Artificial Sequence
  HTT spacer sequence TTCN PAM
uauaaacaugaagaaaaaag

SEQ ID NO: 29367 - RNA, 20 nt, Artificial Sequence
  HTT spacer sequence TTCN PAM
uguuuaauuuggaauuucau

SEQ ID NO: 29368 - RNA, 20 nt, Artificial Sequence
  HTT spacer sequence TTCN PAM
aaauuaaacaugaaaaccca

SEQ ID NO: 29369 - RNA, 20 nt, Artificial Sequence
  HTT spacer sequence TTCN PAM
uuuuggaaacaaauuucaaa

SEQ ID NO: 29370 - RNA, 20 nt, Artificial Sequence
  HTT spacer sequence TTCN PAM
aaaaugaaauuccaaauuaa

SEQ ID NO: 29371 - RNA, 20 nt, Artificial Sequence
  HTT spacer sequence TTCN PAM
aaacuagaauauaagccuag

SEQ ID NO: 29372 - RNA, 20 nt, Artificial Sequence
  HTT spacer sequence TTCN PAM
aguuuugaaauuuguuucca

SEQ ID NO: 29373 - RNA, 20 nt, Artificial Sequence
  HTT spacer sequence TTCN PAM
ugcuaggcuuauauucuagu

SEQ ID NO: 29374 - RNA, 20 nt, Artificial Sequence
  HTT spacer sequence TTCN PAM
accacccagugacuguggcc

SEQ ID NO: 29375 - RNA, 20 nt, Artificial Sequence
  HTT spacer sequence TTCN PAM
gaaaagguaaaauacaucau

SEQ ID NO: 29376 - RNA, 20 nt, Artificial Sequence
  HTT spacer sequence TTCN PAM
gaauaaacugauuuucuacc

SEQ ID NO: 29377 - RNA, 20 nt, Artificial Sequence
  HTT spacer sequence TTCN PAM
accaucuaugauguauuuua

SEQ ID NO: 29378 - RNA, 20 nt, Artificial Sequence
  HTT spacer sequence TTCN PAM
caaaguguuuucagcaauac

SEQ ID NO: 29379 - RNA, 20 nt, Artificial Sequence
  HTT spacer sequence TTCN PAM
gcaauacugccaucuuagcc

SEQ ID NO: 29380 - RNA, 20 nt, Artificial Sequence
  HTT spacer sequence TTCN PAM
ccuaugcaaaaauuucuggg

SEQ ID NO: 29381 - RNA, 20 nt, Artificial Sequence
  HTT spacer sequence TTCN PAM
ggguuaucuuggucccuuac

SEQ ID NO: 29382 - RNA, 20 nt, Artificial Sequence
  HTT spacer sequence TTCN PAM
ucuauguguuuguaggauuu

SEQ ID NO: 29383 - RNA, 20 nt, Artificial Sequence
  HTT spacer sequence TTCN PAM
uucugguacauauauauaau

SEQ ID NO: 29384 - RNA, 20 nt, Artificial Sequence
  HTT spacer sequence TTCN PAM
gguacauauauauaauuuuu

SEQ ID NO: 29385 - RNA, 20 nt, Artificial Sequence
  HTT spacer sequence TTCN PAM
agccugggcaaacagagcaa

SEQ ID NO: 29386 - RNA, 20 nt, Artificial Sequence
  HTT spacer sequence TTCN PAM
agugauucuccugccucagc

SEQ ID NO: 29387 - RNA, 20 nt, Artificial Sequence
  HTT spacer sequence TTCN PAM
ccugccucagcuugaguagc

SEQ ID NO: 29388 - RNA, 20 nt, Artificial Sequence
  HTT spacer sequence TTCN PAM
ccacguuggccaggcugguc

SEQ ID NO: 29389 - RNA, 20 nt, Artificial Sequence
  HTT spacer sequence TTCN PAM
agaccagccuggccaacgug

SEQ ID NO: 29390 - RNA, 20 nt, Artificial Sequence
  HTT spacer sequence TTCN PAM
gcuuccaagcaagagguagu

SEQ ID NO: 29391 - RNA, 20 nt, Artificial Sequence
  HTT spacer sequence TTCN PAM
aagcaagagguaguaacuag

SEQ ID NO: 29392 - RNA, 20 nt, Artificial Sequence
  HTT spacer sequence TTCN PAM
aguuacuaccucuugcuugg

SEQ ID NO: 29393 - RNA, 20 nt, Artificial Sequence
  HTT spacer sequence TTCN PAM
ugucucaaacagugaaacaa

SEQ ID NO: 29394 - RNA, 20 nt, Artificial Sequence
  HTT spacer sequence TTCN PAM
cuguuugagacaggaagaua

SEQ ID NO: 29395 - RNA, 20 nt, Artificial Sequence
  HTT spacer sequence TTCN PAM
aacauuggcccacaggcagg

SEQ ID NO: 29396 - RNA, 20 nt, Artificial Sequence
  HTT spacer sequence TTCN PAM
cucagggaucacuguccugc

SEQ ID NO: 29397 - RNA, 20 nt, Artificial Sequence
  HTT spacer sequence TTCN PAM
ucucucagggaucacugucc

SEQ ID NO: 29398 - RNA, 20 nt, Artificial Sequence
  HTT spacer sequence TTCN PAM
ucuucucucagggaucacug

SEQ ID NO: 29399 - RNA, 20 nt, Artificial Sequence
  HTT spacer sequence TTCN PAM
ugccuggagagagucugaag

SEQ ID NO: 29400 - RNA, 20 nt, Artificial Sequence
  HTT spacer sequence TTCN PAM
gacucucuccaggcaggaag

SEQ ID NO: 29401 - RNA, 20 nt, Artificial Sequence
  HTT spacer sequence TTCN PAM
ccucuuugcagcucucuccu

SEQ ID NO: 29402 - RNA, 20 nt, Artificial Sequence
  HTT spacer sequence TTCN PAM
uuccccucuuugcagcucuc

SEQ ID NO: 29403 - RNA, 20 nt, Artificial Sequence
  HTT spacer sequence TTCN PAM
ccccaagcccagcugagggc

SEQ ID NO: 29404 - RNA, 20 nt, Artificial Sequence
  HTT spacer sequence TTCN PAM
ccacaggcaugugcuuaugc

SEQ ID NO: 29405 - RNA, 20 nt, Artificial Sequence
  HTT spacer sequence TTCN PAM
agggugcuagcccaggcgca

SEQ ID NO: 29406 - RNA, 20 nt, Artificial Sequence
  HTT spacer sequence TTCN PAM
caccagccauugugggaaaa

SEQ ID NO: 29407 - RNA, 20 nt, Artificial Sequence
  HTT spacer sequence TTCN PAM
cacaauggcuggugggaaca

SEQ ID NO: 29408 - RNA, 20 nt, Artificial Sequence
  HTT spacer sequence TTCN PAM
ucuuacccacaacugaggca

SEQ ID NO: 29409 - RNA, 20 nt, Artificial Sequence
  HTT spacer sequence TTCN PAM
gaugcugccuuacagagccu

SEQ ID NO: 29410 - RNA, 20 nt, Artificial Sequence
  HTT spacer sequence TTCN PAM
gggcuuguaggcucuguaag

SEQ ID NO: 29411 - RNA, 20 nt, Artificial Sequence
  HTT spacer sequence TTCN PAM
caaacaacccuccuauggcc

SEQ ID NO: 29412 - RNA, 20 nt, Artificial Sequence
  HTT spacer sequence TTCN PAM
ucaugggccauaggaggguu

SEQ ID NO: 29413 - RNA, 20 nt, Artificial Sequence
  HTT spacer sequence TTCN PAM
guaucugagcuucgucaugg

SEQ ID NO: 29414 - RNA, 20 nt, Artificial Sequence
  HTT spacer sequence TTCN PAM
uucaguaucugagcuucguc

SEQ ID NO: 29415 - RNA, 20 nt, Artificial Sequence
  HTT spacer sequence TTCN PAM
uuccuucaguaucugagcuu

SEQ ID NO: 29416 - RNA, 20 nt, Artificial Sequence
  HTT spacer sequence TTCN PAM
uacuugucccuagcucuucu

SEQ ID NO: 29417 - RNA, 20 nt, Artificial Sequence
  HTT spacer sequence TTCN PAM
ccuccucucacaccucacag

SEQ ID NO: 29418 - RNA, 20 nt, Artificial Sequence
  HTT spacer sequence TTCN PAM
cagccuuauccacuucccuu

SEQ ID NO: 29419 - RNA, 20 nt, Artificial Sequence
  HTT spacer sequence TTCN PAM
cuuccugcagcccuggucca

SEQ ID NO: 29420 - RNA, 20 nt, Artificial Sequence
  HTT spacer sequence TTCN PAM
ugcagcccugguccaagcug

SEQ ID NO: 29421 - RNA, 20 nt, Artificial Sequence
  HTT spacer sequence TTCN PAM
ggagccagacagcagcagcu

SEQ ID NO: 29422 - RNA, 20 nt, Artificial Sequence
  HTT spacer sequence TTCN PAM
ucccauugucccaucccauc

SEQ ID NO: 29423 - RNA, 20 nt, Artificial Sequence
  HTT spacer sequence TTCN PAM
cauugucccaucccaucucu

SEQ ID NO: 29424 - RNA, 20 nt, Artificial Sequence
  HTT spacer sequence TTCN PAM
guggcccucagcucuccccc

SEQ ID NO: 29425 - RNA, 20 nt, Artificial Sequence
  HTT spacer sequence TTCN PAM
gcucuugucagccccaugcc

SEQ ID NO: 29426 - RNA, 20 nt, Artificial Sequence
  HTT spacer sequence TTCN PAM
ggggucuccucaaggaggcc

SEQ ID NO: 29427 - RNA, 20 nt, Artificial Sequence
  HTT spacer sequence TTCN PAM
uugcuguuauguuuuucucc

SEQ ID NO: 29428 - RNA, 20 nt, Artificial Sequence
  HTT spacer sequence TTCN PAM
ccuuaucacuauuuaauuag

SEQ ID NO: 29429 - RNA, 20 nt, Artificial Sequence
  HTT spacer sequence TTCN PAM
uguauuugucuuauuuauug

SEQ ID NO: 29430 - RNA, 20 nt, Artificial Sequence
  HTT spacer sequence TTCN PAM
ucaccauugugcccucagug

SEQ ID NO: 29431 - RNA, 20 nt, Artificial Sequence
  HTT spacer sequence TTCN PAM
ccauugugcccucagugccu

SEQ ID NO: 29432 - RNA, 20 nt, Artificial Sequence
  HTT spacer sequence TTCN PAM
ccagucauccaggauuuacu

SEQ ID NO: 29433 - RNA, 20 nt, Artificial Sequence
  HTT spacer sequence TTCN PAM
ggcucuuaacauuaugauuu

SEQ ID NO: 29434 - RNA, 20 nt, Artificial Sequence
  HTT spacer sequence TTCN PAM
guaauuaaaagggcaagcca

SEQ ID NO: 29435 - RNA, 20 nt, Artificial Sequence
  HTT spacer sequence TTCN PAM
ggcuugcccuuuuaauuaca

SEQ ID NO: 29436 - RNA, 20 nt, Artificial Sequence
  HTT spacer sequence TTCN PAM
gccagugaugggagcuguuu

SEQ ID NO: 29437 - RNA, 20 nt, Artificial Sequence
  HTT spacer sequence TTCN PAM
aagaccugaggaaaagagau

SEQ ID NO: 29438 - RNA, 20 nt, Artificial Sequence
  HTT spacer sequence TTCN PAM
ucaggucuuagaaaacagcu

SEQ ID NO: 29439 - RNA, 20 nt, Artificial Sequence
  HTT spacer sequence TTCN PAM
auaccaacaaaucccaaaag

SEQ ID NO: 29440 - RNA, 20 nt, Artificial Sequence
  HTT spacer sequence TTCN PAM
caugguacucggugguuuga

SEQ ID NO: 29441 - RNA, 20 nt, Artificial Sequence
  HTT spacer sequence TTCN PAM
cuaggacacuguggggaggu

SEQ ID NO: 29442 - RNA, 20 nt, Artificial Sequence
  HTT spacer sequence TTCN PAM
gcucaggauggcugcugagc

SEQ ID NO: 29443 - RNA, 20 nt, Artificial Sequence
  HTT spacer sequence TTCN PAM
caaacccagcucagcagcca

SEQ ID NO: 29444 - RNA, 20 nt, Artificial Sequence
  HTT spacer sequence TTCN PAM
uggaaacaugugagaauaua

SEQ ID NO: 29445 - RNA, 20 nt, Artificial Sequence
  HTT spacer sequence TTCN PAM
augaaccagugaucaaaacu

SEQ ID NO: 29446 - RNA, 20 nt, Artificial Sequence
  HTT spacer sequence TTCN PAM
cacauguuuccaugaaccag

SEQ ID NO: 29447 - RNA, 20 nt, Artificial Sequence
  HTT spacer sequence TTCN PAM
uauauauucucacauguuuc

SEQ ID NO: 29448 - RNA, 20 nt, Artificial Sequence
  HTT spacer sequence TTCN PAM
uucuuucaaucacuaauuca

SEQ ID NO: 29449 - RNA, 20 nt, Artificial Sequence
  HTT spacer sequence TTCN PAM
uucaaucacuaauucauuca

SEQ ID NO: 29450 - RNA, 20 nt, Artificial Sequence
  HTT spacer sequence TTCN PAM
aucacuaauucauucauuua

SEQ ID NO: 29451 - RNA, 20 nt, Artificial Sequence
  HTT spacer sequence TTCN PAM
uucauuuauacauucagccc

SEQ ID NO: 29452 - RNA, 20 nt, Artificial Sequence
  HTT spacer sequence TTCN PAM
uuuauacauucagccccuug

SEQ ID NO: 29453 - RNA, 20 nt, Artificial Sequence
  HTT spacer sequence TTCN PAM
gccccuuguuuaaauaugug

SEQ ID NO: 29454 - RNA, 20 nt, Artificial Sequence
  HTT spacer sequence TTCN PAM
ugccggucagcaggaagucu

SEQ ID NO: 29455 - RNA, 20 nt, Artificial Sequence
  HTT spacer sequence TTCN PAM
ugcugaccggcaggaagcac

SEQ ID NO: 29456 - RNA, 20 nt, Artificial Sequence
  HTT spacer sequence TTCN PAM
uaagacuuccugcugaccgg

SEQ ID NO: 29457 - RNA, 20 nt, Artificial Sequence
  HTT spacer sequence TTCN PAM
ggggccaauccguuauguac

SEQ ID NO: 29458 - RNA, 20 nt, Artificial Sequence
  HTT spacer sequence TTCN PAM
aaaggacccacuguacauaa

SEQ ID NO: 29459 - RNA, 20 nt, Artificial Sequence
  HTT spacer sequence TTCN PAM
cacagccucgagcugucucc

SEQ ID NO: 29460 - RNA, 20 nt, Artificial Sequence
  HTT spacer sequence TTCN PAM
ccaaggccggcuagaccugu

SEQ ID NO: 29461 - RNA, 20 nt, Artificial Sequence
  HTT spacer sequence TTCN PAM
ggguggagauggagacugaa

SEQ ID NO: 29462 - RNA, 20 nt, Artificial Sequence
  HTT spacer sequence TTCN PAM
gucuccaucuccacccagaa

SEQ ID NO: 29463 - RNA, 20 nt, Artificial Sequence
  HTT spacer sequence TTCN PAM
ggcuuuucagucuccaucuc

SEQ ID NO: 29464 - RNA, 20 nt, Artificial Sequence
  HTT spacer sequence TTCN PAM
caccuggcaugucuugcagc

SEQ ID NO: 29465 - RNA, 20 nt, Artificial Sequence
  HTT spacer sequence TTCN PAM
cucaccuccaccccacugug

SEQ ID NO: 29466 - RNA, 20 nt, Artificial Sequence
  HTT spacer sequence TTCN PAM
ggcugccucuggaaggccag

SEQ ID NO: 29467 - RNA, 20 nt, Artificial Sequence
  HTT spacer sequence TTCN PAM
agaggcagccagaaaaaggg

SEQ ID NO: 29468 - RNA, 20 nt, Artificial Sequence
  HTT spacer sequence TTCN PAM
cuuugcccugcucccuggga

SEQ ID NO: 29469 - RNA, 20 nt, Artificial Sequence
  HTT spacer sequence TTCN PAM
aaggggcuuccuccuaaggu

SEQ ID NO: 29470 - RNA, 20 nt, Artificial Sequence
  HTT spacer sequence TTCN PAM
aacccugaggagaggcugga

SEQ ID NO: 29471 - RNA, 20 nt, Artificial Sequence
  HTT spacer sequence TTCN PAM
uccuaaggugcagaggcagc

SEQ ID NO: 29472 - RNA, 20 nt, Artificial Sequence
  HTT spacer sequence TTCN PAM
cacagggcugccucugcacc

SEQ ID NO: 29473 - RNA, 20 nt, Artificial Sequence
  HTT spacer sequence TTCN PAM
aguugugugagacucaguuu

SEQ ID NO: 29474 - RNA, 20 nt, Artificial Sequence
  HTT spacer sequence TTCN PAM
uucuuuuucuuuucuuuucc

SEQ ID NO: 29475 - RNA, 20 nt, Artificial Sequence
  HTT spacer sequence TTCN PAM
uuuucuuuucuuuuccuuuu

SEQ ID NO: 29476 - RNA, 20 nt, Artificial Sequence
  HTT spacer sequence TTCN PAM
uuucuuuuccuuuuuuuuuu

SEQ ID NO: 29477 - RNA, 20 nt, Artificial Sequence
  HTT spacer sequence TTCN PAM
uuuccuuuuuuuuuuuuuuu

SEQ ID NO: 29478 - RNA, 20 nt, Artificial Sequence
  HTT spacer sequence TTCN PAM
uuuuuuuuuuuuuuuuuuuu

SEQ ID NO: 29479 - RNA, 20 nt, Artificial Sequence
  HTT spacer sequence TTCN PAM
agccugggcaauagagcaag

SEQ ID NO: 29480 - RNA, 20 nt, Artificial Sequence
  HTT spacer sequence TTCN PAM
agguucaaacgauucuccug

SEQ ID NO: 29481 - RNA, 20 nt, Artificial Sequence
  HTT spacer sequence TTCN PAM
aacgauucuccugcgucagc

SEQ ID NO: 29482 - RNA, 20 nt, Artificial Sequence
  HTT spacer sequence TTCN PAM
ccugcgucagccuccugagu

SEQ ID NO: 29483 - RNA, 20 nt, Artificial Sequence
  HTT spacer sequence TTCN PAM
auuaaaaacacaaaauuagc

SEQ ID NO: 29484 - RNA, 20 nt, Artificial Sequence
  HTT spacer sequence TTCN PAM
ccauguuggccaggcuggau

SEQ ID NO: 29485 - RNA, 20 nt, Artificial Sequence
  HTT spacer sequence TTCN PAM
uucuuuuuuuuuuuugacac

SEQ ID NO: 29486 - RNA, 20 nt, Artificial Sequence
  HTT spacer sequence TTCN PAM
uuuuuuuuuuugacacgggg

SEQ ID NO: 29487 - RNA, 20 nt, Artificial Sequence
  HTT spacer sequence TTCN PAM
ccucugcaaaaaauccaacu

SEQ ID NO: 29488 - RNA, 20 nt, Artificial Sequence
  HTT spacer sequence TTCN PAM
guuucuuuuucuguauuugu

SEQ ID NO: 29489 - RNA, 20 nt, Artificial Sequence
  HTT spacer sequence TTCN PAM
uuuucuguauuuguguuuua

SEQ ID NO: 29490 - RNA, 20 nt, Artificial Sequence
  HTT spacer sequence TTCN PAM
guauuuguguuuuaaaggcu

SEQ ID NO: 29491 - RNA, 20 nt, Artificial Sequence
  HTT spacer sequence TTCN PAM
gauagagugggugguuaucu

SEQ ID NO: 29492 - RNA, 20 nt, Artificial Sequence
  HTT spacer sequence TTCN PAM
uccuaccucuaaggccucuu

SEQ ID NO: 29493 - RNA, 20 nt, Artificial Sequence
  HTT spacer sequence TTCN PAM
ccuugccccacauuguagga

SEQ ID NO: 29494 - RNA, 20 nt, Artificial Sequence
  HTT spacer sequence TTCN PAM
aauagguccuacaauguggg

SEQ ID NO: 29495 - RNA, 20 nt, Artificial Sequence
  HTT spacer sequence TTCN PAM
aggcccagcaguaaugaugc

SEQ ID NO: 29496 - RNA, 20 nt, Artificial Sequence
  HTT spacer sequence TTCN PAM
agauaaacagggagcugaug

SEQ ID NO: 29497 - RNA, 20 nt, Artificial Sequence
  HTT spacer sequence TTCN PAM
agauucaagauaaacaggga

SEQ ID NO: 29498 - RNA, 20 nt, Artificial Sequence
  HTT spacer sequence TTCN PAM
ggcuuaagugugucugcaga

SEQ ID NO: 29499 - RNA, 20 nt, Artificial Sequence
  HTT spacer sequence TTCN PAM
agauggcaauucuggcuuaa

SEQ ID NO: 29500 - RNA, 20 nt, Artificial Sequence
  HTT spacer sequence TTCN PAM
agaggcaucugcacaccagg

SEQ ID NO: 29501 - RNA, 20 nt, Artificial Sequence
  HTT spacer sequence TTCN PAM
gacuucguuggugguaacca

SEQ ID NO: 29502 - RNA, 20 nt, Artificial Sequence
  HTT spacer sequence TTCN PAM
uuggugguaaccaguucugg

SEQ ID NO: 29503 - RNA, 20 nt, Artificial Sequence
  HTT spacer sequence TTCN PAM
gguaaacagucugaaaauug

SEQ ID NO: 29504 - RNA, 20 nt, Artificial Sequence
  HTT spacer sequence TTCN PAM
gacuguuuaccagaacuggu

SEQ ID NO: 29505 - RNA, 20 nt, Artificial Sequence
  HTT spacer sequence TTCN PAM
agcaugugguggaaaaguaa

SEQ ID NO: 29506 - RNA, 20 nt, Artificial Sequence
  HTT spacer sequence TTCN PAM
accacaugcuagaaacuguc

SEQ ID NO: 29507 - RNA, 20 nt, Artificial Sequence
  HTT spacer sequence TTCN PAM
accugggucgcugggcacug

SEQ ID NO: 29508 - RNA, 20 nt, Artificial Sequence
  HTT spacer sequence TTCN PAM
cgcccgugagugagguagcg

SEQ ID NO: 29509 - RNA, 20 nt, Artificial Sequence
  HTT spacer sequence TTCN PAM
ccccccaggggccucguccc

SEQ ID NO: 29510 - RNA, 20 nt, Artificial Sequence
  HTT spacer sequence TTCN PAM
ccgcccacccugagguaccg

SEQ ID NO: 29511 - RNA, 20 nt, Artificial Sequence
  HTT spacer sequence TTCN PAM
agacgcggagaccgcccccc

SEQ ID NO: 29512 - RNA, 20 nt, Artificial Sequence
  HTT spacer sequence TTCN PAM
gggcgggggccggguguccc

SEQ ID NO: 29513 - RNA, 20 nt, Artificial Sequence
  HTT spacer sequence TTCN PAM
caccccucgcgccccucugg

SEQ ID NO: 29514 - RNA, 20 nt, Artificial Sequence
  HTT spacer sequence TTCN PAM
cggaauccaaacuucccucu

SEQ ID NO: 29515 - RNA, 20 nt, Artificial Sequence
  HTT spacer sequence TTCN PAM
gggaagggcggagagcgagu

SEQ ID NO: 29516 - RNA, 20 nt, Artificial Sequence
  HTT spacer sequence TTCN PAM
cucugcagcggccgcgcuuc

SEQ ID NO: 29517 - RNA, 20 nt, Artificial Sequence
  HTT spacer sequence TTCN PAM
cggagggcaagaaaagccgc

SEQ ID NO: 29518 - RNA, 20 nt, Artificial Sequence
  HTT spacer sequence TTCN PAM
ugcccuccgugaagcgcggc

SEQ ID NO: 29519 - RNA, 20 nt, Artificial Sequence
  HTT spacer sequence TTCN PAM
cacugaagugugagugacug

SEQ ID NO: 29520 - RNA, 20 nt, Artificial Sequence
  HTT spacer sequence TTCN PAM
gugugaaucagcgccagugg

SEQ ID NO: 29521 - RNA, 20 nt, Artificial Sequence
  HTT spacer sequence TTCN PAM
cuguugcccaugagagucuc

SEQ ID NO: 29522 - RNA, 20 nt, Artificial Sequence
  HTT spacer sequence TTCN PAM
accuguacgcuggccucccu

SEQ ID NO: 29523 - RNA, 20 nt, Artificial Sequence
  HTT spacer sequence TTCN PAM
cgcugcucugggccucggcu

SEQ ID NO: 29524 - RNA, 20 nt, Artificial Sequence
  HTT spacer sequence TTCN PAM
gcuggugcuccuuuccguga

SEQ ID NO: 29525 - RNA, 20 nt, Artificial Sequence
  HTT spacer sequence TTCN PAM
gugagcaccuccuauccccu

SEQ ID NO: 29526 - RNA, 20 nt, Artificial Sequence
  HTT spacer sequence TTCN PAM
aauuggcuguggccaggggc

SEQ ID NO: 29527 - RNA, 20 nt, Artificial Sequence
  HTT spacer sequence TTCN PAM
aaggacuuaaguguggccac

SEQ ID NO: 29528 - RNA, 20 nt, Artificial Sequence
  HTT spacer sequence TTCN PAM
acacauugcaucaccggccc

SEQ ID NO: 29529 - RNA, 20 nt, Artificial Sequence
  HTT spacer sequence TTCN PAM
acaaccgccugaaggcaggg

SEQ ID NO: 29530 - RNA, 20 nt, Artificial Sequence
  HTT spacer sequence TTCN PAM
ggcgguuguggaaacaauuc

SEQ ID NO: 29531 - RNA, 20 nt, Artificial Sequence
  HTT spacer sequence TTCN PAM
gcaaggaggaggcugugggc

SEQ ID NO: 29532 - RNA, 20 nt, Artificial Sequence
  HTT spacer sequence TTCN PAM
ggucagcccugcaccaacuc

SEQ ID NO: 29533 - RNA, 20 nt, Artificial Sequence
  HTT spacer sequence TTCN PAM
ucccacucuguccacugucu

SEQ ID NO: 29534 - RNA, 20 nt, Artificial Sequence
  HTT spacer sequence TTCN PAM
cacucuguccacugucuccu

SEQ ID NO: 29535 - RNA, 20 nt, Artificial Sequence
  HTT spacer sequence TTCN PAM
acggugucuacguagaggag

SEQ ID NO: 29536 - RNA, 20 nt, Artificial Sequence
  HTT spacer sequence TTCN PAM
gucuauccccucucccugcc

SEQ ID NO: 29537 - RNA, 20 nt, Artificial Sequence
  HTT spacer sequence TTCN PAM
gccugcccccuccagggugu

SEQ ID NO: 29538 - RNA, 20 nt, Artificial Sequence
  HTT spacer sequence TTCN PAM
uucugccugcccccuccagg

SEQ ID NO: 29539 - RNA, 20 nt, Artificial Sequence
  HTT spacer sequence TTCN PAM
uagacacggcugccuaucug

SEQ ID NO: 29540 - RNA, 20 nt, Artificial Sequence
  HTT spacer sequence TTCN PAM
gggaguccccaggccuccag

SEQ ID NO: 29541 - RNA, 20 nt, Artificial Sequence
  HTT spacer sequence TTCN PAM
ggccagccuccuuggugggc

SEQ ID NO: 29542 - RNA, 20 nt, Artificial Sequence
  HTT spacer sequence TTCN PAM
gcccacauggacagaggaag

SEQ ID NO: 29543 - RNA, 20 nt, Artificial Sequence
  HTT spacer sequence TTCN PAM
ucuguccaugugggcagaaa

SEQ ID NO: 29544 - RNA, 20 nt, Artificial Sequence
  HTT spacer sequence TTCN PAM
cgucugugggccugcuugug

SEQ ID NO: 29545 - RNA, 20 nt, Artificial Sequence
  HTT spacer sequence TTCN PAM
ugaggggcagggaggaaggg

SEQ ID NO: 29546 - RNA, 20 nt, Artificial Sequence
  HTT spacer sequence TTCN PAM
ucccugccccucaggaacca

SEQ ID NO: 29547 - RNA, 20 nt, Artificial Sequence
  HTT spacer sequence TTCN PAM
cacccaagauccuggcugag

SEQ ID NO: 29548 - RNA, 20 nt, Artificial Sequence
  HTT spacer sequence TTCN PAM
agcugugugaucauggccag

SEQ ID NO: 29549 - RNA, 20 nt, Artificial Sequence
  HTT spacer sequence TTCN PAM
cccugccaccccuccguuuu

SEQ ID NO: 29550 - RNA, 20 nt, Artificial Sequence
  HTT spacer sequence TTCN PAM
cauccaugaccugagggcug

SEQ ID NO: 29551 - RNA, 20 nt, Artificial Sequence
  HTT spacer sequence TTCN PAM
cagcccucaggucauggaug

SEQ ID NO: 29552 - RNA, 20 nt, Artificial Sequence
  HTT spacer sequence TTCN PAM
gugacagugggucgcugagg

SEQ ID NO: 29553 - RNA, 20 nt, Artificial Sequence
  HTT spacer sequence TTCN PAM
ugcccacauuggacuaaggc

SEQ ID NO: 29554 - RNA, 20 nt, Artificial Sequence
  HTT spacer sequence TTCN PAM
ugcguucuguccucaaaagc

SEQ ID NO: 29555 - RNA, 20 nt, Artificial Sequence
  HTT spacer sequence TTCN PAM
guccucaaaagcucccuugu

SEQ ID NO: 29556 - RNA, 20 nt, Artificial Sequence
  HTT spacer sequence TTCN PAM
uuaauaaccggguggcuugg

SEQ ID NO: 29557 - RNA, 20 nt, Artificial Sequence
  HTT spacer sequence TTCN PAM
ccucacccacccaggcugca

SEQ ID NO: 29558 - RNA, 20 nt, Artificial Sequence
  HTT spacer sequence TTCN PAM
ccgccagccugcccuucucc

SEQ ID NO: 29559 - RNA, 20 nt, Artificial Sequence
  HTT spacer sequence TTCN PAM
ccgucuuuuccccgccagcc

SEQ ID NO: 29560 - RNA, 20 nt, Artificial Sequence
  HTT spacer sequence TTCN PAM
uuggcccgaggggugggagc

SEQ ID NO: 29561 - RNA, 20 nt, Artificial Sequence
  HTT spacer sequence TTCN PAM
ccuugccucccaggccccuc

SEQ ID NO: 29562 - RNA, 20 nt, Artificial Sequence
  HTT spacer sequence TTCN PAM
agggucugcacggccccuuc

SEQ ID NO: 29563 - RNA, 20 nt, Artificial Sequence
  HTT spacer sequence TTCN PAM
uccaggauaggcggcuccuc

SEQ ID NO: 29564 - RNA, 20 nt, Artificial Sequence
  HTT spacer sequence TTCN PAM
ggggaggagccgccuauccu

SEQ ID NO: 29565 - RNA, 20 nt, Artificial Sequence
  HTT spacer sequence TTCN PAM
ucugguggcccugucuggac

SEQ ID NO: 29566 - RNA, 20 nt, Artificial Sequence
  HTT spacer sequence TTCN PAM
gguggcccugucuggacacc

SEQ ID NO: 29567 - RNA, 20 nt, Artificial Sequence
  HTT spacer sequence TTCN PAM
ggcucacuggcuggcccccu

SEQ ID NO: 29568 - RNA, 20 nt, Artificial Sequence
  HTT spacer sequence TTCN PAM
cuggggcacuggacccuccu

SEQ ID NO: 29569 - RNA, 20 nt, Artificial Sequence
  HTT spacer sequence TTCN PAM
ccuacaaggcucaggucucc

SEQ ID NO: 29570 - RNA, 20 nt, Artificial Sequence
  HTT spacer sequence TTCN PAM
ugacccucaguuuccugauc

SEQ ID NO: 29571 - RNA, 20 nt, Artificial Sequence
  HTT spacer sequence TTCN PAM
ugaucugcaaaacgggauga

SEQ ID NO: 29572 - RNA, 20 nt, Artificial Sequence
  HTT spacer sequence TTCN PAM
gucaucccguuuugcagauc

SEQ ID NO: 29573 - RNA, 20 nt, Artificial Sequence
  HTT spacer sequence TTCN PAM
gugccgggccccugacuaca

SEQ ID NO: 29574 - RNA, 20 nt, Artificial Sequence
  HTT spacer sequence TTCN PAM
agggugacgcgagagaagca

SEQ ID NO: 29575 - RNA, 20 nt, Artificial Sequence
  HTT spacer sequence TTCN PAM
cucgcgucacccuugaagga

SEQ ID NO: 29576 - RNA, 20 nt, Artificial Sequence
  HTT spacer sequence TTCN PAM
gggcggguggagaccugggu

SEQ ID NO: 29577 - RNA, 20 nt, Artificial Sequence
  HTT spacer sequence TTCN PAM
agguggugcaggcucccagg

SEQ ID NO: 29578 - RNA, 20 nt, Artificial Sequence
  HTT spacer sequence TTCN PAM
ccccuccugggagccugcac

SEQ ID NO: 29579 - RNA, 20 nt, Artificial Sequence
  HTT spacer sequence TTCN PAM
cucuucuccccaggcucugu

SEQ ID NO: 29580 - RNA, 20 nt, Artificial Sequence
  HTT spacer sequence TTCN PAM
ccccaggcucuguaacuucc

SEQ ID NO: 29581 - RNA, 20 nt, Artificial Sequence
  HTT spacer sequence TTCN PAM
aaggccaugagaguggucag

SEQ ID NO: 29582 - RNA, 20 nt, Artificial Sequence
  HTT spacer sequence TTCN PAM
cggcccccgaucacagaucg

SEQ ID NO: 29583 - RNA, 20 nt, Artificial Sequence
  HTT spacer sequence TTCN PAM
agcacgaucugugaucgggg

SEQ ID NO: 29584 - RNA, 20 nt, Artificial Sequence
  HTT spacer sequence TTCN PAM
ucauggauuccggucacauc

SEQ ID NO: 29585 - RNA, 20 nt, Artificial Sequence
  HTT spacer sequence TTCN PAM
uggauuccggucacaucugg

SEQ ID NO: 29586 - RNA, 20 nt, Artificial Sequence
  HTT spacer sequence TTCN PAM
ggucacaucugguccaucuu

SEQ ID NO: 29587 - RNA, 20 nt, Artificial Sequence
  HTT spacer sequence TTCN PAM
cagaggccagcugacaaaga

SEQ ID NO: 29588 - RNA, 20 nt, Artificial Sequence
  HTT spacer sequence TTCN PAM
ucccagaggccagcugacaa

SEQ ID NO: 29589 - RNA, 20 nt, Artificial Sequence
  HTT spacer sequence TTCN PAM
aagaagugcccucugcuucc

SEQ ID NO: 29590 - RNA, 20 nt, Artificial Sequence
  HTT spacer sequence TTCN PAM
uggaaucagcucagcuacag

SEQ ID NO: 29591 - RNA, 20 nt, Artificial Sequence
  HTT spacer sequence TTCN PAM
uugugaaucagauguuuacu

SEQ ID NO: 29592 - RNA, 20 nt, Artificial Sequence
  HTT spacer sequence TTCN PAM
caaggaagcagagggcacuu

SEQ ID NO: 29593 - RNA, 20 nt, Artificial Sequence
  HTT spacer sequence TTCN PAM
ugaggcuguugccugccagc

SEQ ID NO: 29594 - RNA, 20 nt, Artificial Sequence
  HTT spacer sequence TTCN PAM
cucggccccugccucgcggc

SEQ ID NO: 29595 - RNA, 20 nt, Artificial Sequence
  HTT spacer sequence TTCN PAM
cucaggcaccagaggggagc

SEQ ID NO: 29596 - RNA, 20 nt, Artificial Sequence
  HTT spacer sequence TTCN PAM
gggcucagagcaggcuucgu

SEQ ID NO: 29597 - RNA, 20 nt, Artificial Sequence
  HTT spacer sequence TTCN PAM
ucugagggcuucagcguccu

SEQ ID NO: 29598 - RNA, 20 nt, Artificial Sequence
  HTT spacer sequence TTCN PAM
gcguccuccuugugaaaugg

SEQ ID NO: 29599 - RNA, 20 nt, Artificial Sequence
  HTT spacer sequence TTCN PAM
caaggaggacgcugaagccc

SEQ ID NO: 29600 - RNA, 20 nt, Artificial Sequence
  HTT spacer sequence TTCN PAM
ccccauuucacaaggaggac

SEQ ID NO: 29601 - RNA, 20 nt, Artificial Sequence
  HTT spacer sequence TTCN PAM
cacagugucaagggcaggga

SEQ ID NO: 29602 - RNA, 20 nt, Artificial Sequence
  HTT spacer sequence TTCN PAM
uucagccucgauccaggggu

SEQ ID NO: 29603 - RNA, 20 nt, Artificial Sequence
  HTT spacer sequence TTCN PAM
gccucgauccagggguguug

SEQ ID NO: 29604 - RNA, 20 nt, Artificial Sequence
  HTT spacer sequence TTCN PAM
guggcauuugaggguccugg

SEQ ID NO: 29605 - RNA, 20 nt, Artificial Sequence
  HTT spacer sequence TTCN PAM
caccuuguccaggggcagcc

SEQ ID NO: 29606 - RNA, 20 nt, Artificial Sequence
  HTT spacer sequence TTCN PAM
gggagccuggaaugcugggc

SEQ ID NO: 29607 - RNA, 20 nt, Artificial Sequence
  HTT spacer sequence TTCN PAM
aggcucccagaaugaccccu

SEQ ID NO: 29608 - RNA, 20 nt, Artificial Sequence
  HTT spacer sequence TTCN PAM
cagccuugggagucuggggc

SEQ ID NO: 29609 - RNA, 20 nt, Artificial Sequence
  HTT spacer sequence TTCN PAM
gccucuggggcaguggugga

SEQ ID NO: 29610 - RNA, 20 nt, Artificial Sequence
  HTT spacer sequence TTCN PAM
gaaggcugcugcccagcccc

SEQ ID NO: 29611 - RNA, 20 nt, Artificial Sequence
  HTT spacer sequence TTCN PAM
gaaggagguccaccacugcc

SEQ ID NO: 29612 - RNA, 20 nt, Artificial Sequence
  HTT spacer sequence TTCN PAM
aagggagagaguggcaaggu

SEQ ID NO: 29613 - RNA, 20 nt, Artificial Sequence
  HTT spacer sequence TTCN PAM
gcugaagacauaagugucug

SEQ ID NO: 29614 - RNA, 20 nt, Artificial Sequence
  HTT spacer sequence TTCN PAM
gcugaaauugcuucuaaggg

SEQ ID NO: 29615 - RNA, 20 nt, Artificial Sequence
  HTT spacer sequence TTCN PAM
ugagcccccagccuggucua

SEQ ID NO: 29616 - RNA, 20 nt, Artificial Sequence
  HTT spacer sequence TTCN PAM
caagcaggaggggcaggcgg

SEQ ID NO: 29617 - RNA, 20 nt, Artificial Sequence
  HTT spacer sequence TTCN PAM
ugaguucccaagcaggaggg

SEQ ID NO: 29618 - RNA, 20 nt, Artificial Sequence
  HTT spacer sequence TTCN PAM
ucugggacaggcccacgugg

SEQ ID NO: 29619 - RNA, 20 nt, Artificial Sequence
  HTT spacer sequence TTCN PAM
cugcccaggagugggaggcu

SEQ ID NO: 29620 - RNA, 20 nt, Artificial Sequence
  HTT spacer sequence TTCN PAM
aagagcuuggcacagcccgc

SEQ ID NO: 29621 - RNA, 20 nt, Artificial Sequence
  HTT spacer sequence TTCN PAM
aaucagauaauaucagacug

SEQ ID NO: 29622 - RNA, 20 nt, Artificial Sequence
  HTT spacer sequence TTCN PAM
ugggagaccaaagcacaaca

SEQ ID NO: 29623 - RNA, 20 nt, Artificial Sequence
  HTT spacer sequence TTCN PAM
gguuuccaucacagccuccu

SEQ ID NO: 29624 - RNA, 20 nt, Artificial Sequence
  HTT spacer sequence TTCN PAM
aucacagccuccucccuucc

SEQ ID NO: 29625 - RNA, 20 nt, Artificial Sequence
  HTT spacer sequence TTCN PAM
cccugcgggcugcgcuguga

SEQ ID NO: 29626 - RNA, 20 nt, Artificial Sequence
  HTT spacer sequence TTCN PAM
gggccuggucucgguggccc

SEQ ID NO: 29627 - RNA, 20 nt, Artificial Sequence
  HTT spacer sequence TTCN PAM
ucaccaggcuuugguccucc

SEQ ID NO: 29628 - RNA, 20 nt, Artificial Sequence
  HTT spacer sequence TTCN PAM
gggagaggacaggggacacc

SEQ ID NO: 29629 - RNA, 20 nt, Artificial Sequence
  HTT spacer sequence TTCN PAM
uucagggagaggacagggga

SEQ ID NO: 29630 - RNA, 20 nt, Artificial Sequence
  HTT spacer sequence TTCN PAM
uucucuguagcugcucuucc

SEQ ID NO: 29631 - RNA, 20 nt, Artificial Sequence
  HTT spacer sequence TTCN PAM
cuguagcugcucuuccuaaa

SEQ ID NO: 29632 - RNA, 20 nt, Artificial Sequence
  HTT spacer sequence TTCN PAM
uaaacguguguuggcuugag

SEQ ID NO: 29633 - RNA, 20 nt, Artificial Sequence
  HTT spacer sequence TTCN PAM
caccauuaggagggcaaugg

SEQ ID NO: 29634 - RNA, 20 nt, Artificial Sequence
  HTT spacer sequence TTCN PAM
ccauugcccuccuaauggug

SEQ ID NO: 29635 - RNA, 20 nt, Artificial Sequence
  HTT spacer sequence TTCN PAM
ggaucuuuccccauugcccu

SEQ ID NO: 29636 - RNA, 20 nt, Artificial Sequence
  HTT spacer sequence TTCN PAM
uggccugccuccucuggcuc

SEQ ID NO: 29637 - RNA, 20 nt, Artificial Sequence
  HTT spacer sequence TTCN PAM
gagagaggagaugagugccg

SEQ ID NO: 29638 - RNA, 20 nt, Artificial Sequence
  HTT spacer sequence TTCN PAM
ucuccuccuacucgaggcca

SEQ ID NO: 29639 - RNA, 20 nt, Artificial Sequence
  HTT spacer sequence TTCN PAM
ggccucgaguaggaggagag

SEQ ID NO: 29640 - RNA, 20 nt, Artificial Sequence
  HTT spacer sequence TTCN PAM
cuuucuggccucgaguagga

SEQ ID NO: 29641 - RNA, 20 nt, Artificial Sequence
  HTT spacer sequence TTCN PAM
aguggggugaguggcuggcg

SEQ ID NO: 29642 - RNA, 20 nt, Artificial Sequence
  HTT spacer sequence TTCN PAM
ccucugcccuggucaaacuc

SEQ ID NO: 29643 - RNA, 20 nt, Artificial Sequence
  HTT spacer sequence TTCN PAM
cccagcucgggggaugcacc

SEQ ID NO: 29644 - RNA, 20 nt, Artificial Sequence
  HTT spacer sequence TTCN PAM
cguugccaucaccucuugug

SEQ ID NO: 29645 - RNA, 20 nt, Artificial Sequence
  HTT spacer sequence TTCN PAM
caggcugagaccucuaggaa

SEQ ID NO: 29646 - RNA, 20 nt, Artificial Sequence
  HTT spacer sequence TTCN PAM
uagaggucucagccugggaa

SEQ ID NO: 29647 - RNA, 20 nt, Artificial Sequence
  HTT spacer sequence TTCN PAM
cugggcagggcagggacagg

SEQ ID NO: 29648 - RNA, 20 nt, Artificial Sequence
  HTT spacer sequence TTCN PAM
ugucccugcccugcccagag

SEQ ID NO: 29649 - RNA, 20 nt, Artificial Sequence
  HTT spacer sequence TTCN PAM
caggccccgugcugcgugca

SEQ ID NO: 29650 - RNA, 20 nt, Artificial Sequence
  HTT spacer sequence TTCN PAM
uuccugcuguaccccugcug

SEQ ID NO: 29651 - RNA, 20 nt, Artificial Sequence
  HTT spacer sequence TTCN PAM
ugcuguaccccugcuggcug

SEQ ID NO: 29652 - RNA, 20 nt, Artificial Sequence
  HTT spacer sequence TTCN PAM
uccccaccggaggagcugcu

SEQ ID NO: 29653 - RNA, 20 nt, Artificial Sequence
  HTT spacer sequence TTCN PAM
acccccagggucccgccugg

SEQ ID NO: 29654 - RNA, 20 nt, Artificial Sequence
  HTT spacer sequence TTCN PAM
gagauuccacccccaggguc

SEQ ID NO: 29655 - RNA, 20 nt, Artificial Sequence
  HTT spacer sequence TTCN PAM
ccucgggacccucaccgcga

SEQ ID NO: 29656 - RNA, 20 nt, Artificial Sequence
  HTT spacer sequence TTCN PAM
cucagcuucagacccugggc

SEQ ID NO: 29657 - RNA, 20 nt, Artificial Sequence
  HTT spacer sequence TTCN PAM
gacccugggcugcagcugcc

SEQ ID NO: 29658 - RNA, 20 nt, Artificial Sequence
  HTT spacer sequence TTCN PAM
ggaagguuugcuacuugggg

SEQ ID NO: 29659 - RNA, 20 nt, Artificial Sequence
  HTT spacer sequence TTCN PAM
ugaagccagcacccaggacc

SEQ ID NO: 29660 - RNA, 20 nt, Artificial Sequence
  HTT spacer sequence TTCN PAM
cauuuucuugaggaugugac

SEQ ID NO: 29661 - RNA, 20 nt, Artificial Sequence
  HTT spacer sequence TTCN PAM
ugaggaugugaccaggaggg

SEQ ID NO: 29662 - RNA, 20 nt, Artificial Sequence
  HTT spacer sequence TTCN PAM
ugccccagaggcaggcacag

SEQ ID NO: 29663 - RNA, 20 nt, Artificial Sequence
  HTT spacer sequence TTCN PAM
ccagcaacuuccugccccag

SEQ ID NO: 29664 - RNA, 20 nt, Artificial Sequence
  HTT spacer sequence TTCN PAM
uuccccagcaacuuccugcc

SEQ ID NO: 29665 - RNA, 20 nt, Artificial Sequence
  HTT spacer sequence TTCN PAM
uccuuccccagcaacuuccu

SEQ ID NO: 29666 - RNA, 20 nt, Artificial Sequence
  HTT spacer sequence TTCN PAM
caaucuucuuccuuccccag

SEQ ID NO: 29667 - RNA, 20 nt, Artificial Sequence
  HTT spacer sequence TTCN PAM
ugccggcuggcaucaagggg

SEQ ID NO: 29668 - RNA, 20 nt, Artificial Sequence
  HTT spacer sequence TTCN PAM
agggcugguguccugagaag

SEQ ID NO: 29669 - RNA, 20 nt, Artificial Sequence
  HTT spacer sequence TTCN PAM
caggacaccagcccuggaau

SEQ ID NO: 29670 - RNA, 20 nt, Artificial Sequence
  HTT spacer sequence TTCN PAM
agggggccugggucccaagu

SEQ ID NO: 29671 - RNA, 20 nt, Artificial Sequence
  HTT spacer sequence TTCN PAM
aguacgaagcugggaaaagg

SEQ ID NO: 29672 - RNA, 20 nt, Artificial Sequence
  HTT spacer sequence TTCN PAM
uacuggaagggccaggaccc

SEQ ID NO: 29673 - RNA, 20 nt, Artificial Sequence
  HTT spacer sequence TTCN PAM
cagcuucguacuggaagggc

SEQ ID NO: 29674 - RNA, 20 nt, Artificial Sequence
  HTT spacer sequence TTCN PAM
cacagccugagcccucagcc

SEQ ID NO: 29675 - RNA, 20 nt, Artificial Sequence
  HTT spacer sequence TTCN PAM
aaaccagggugucuuucaca

SEQ ID NO: 29676 - RNA, 20 nt, Artificial Sequence
  HTT spacer sequence TTCN PAM
agcaggggcuggcuuauguu

SEQ ID NO: 29677 - RNA, 20 nt, Artificial Sequence
  HTT spacer sequence TTCN PAM
agcuuacucuggggucugga

SEQ ID NO: 29678 - RNA, 20 nt, Artificial Sequence
  HTT spacer sequence TTCN PAM
gcaguggucuccagacccca

SEQ ID NO: 29679 - RNA, 20 nt, Artificial Sequence
  HTT spacer sequence TTCN PAM
uguggccacugcuuggaggg

SEQ ID NO: 29680 - RNA, 20 nt, Artificial Sequence
  HTT spacer sequence TTCN PAM
ccagaccccgcccgagcucc

SEQ ID NO: 29681 - RNA, 20 nt, Artificial Sequence
  HTT spacer sequence TTCN PAM
gucuguggcagcccccaccc

SEQ ID NO: 29682 - RNA, 20 nt, Artificial Sequence
  HTT spacer sequence TTCN PAM
ucgaggcugcagaaggcugg

SEQ ID NO: 29683 - RNA, 20 nt, Artificial Sequence
  HTT spacer sequence TTCN PAM
gcagccucgacgaacccacu

SEQ ID NO: 29684 - RNA, 20 nt, Artificial Sequence
  HTT spacer sequence TTCN PAM
uccccuguagccccugugca

SEQ ID NO: 29685 - RNA, 20 nt, Artificial Sequence
  HTT spacer sequence TTCN PAM
ggcagacaguggcauggucc

SEQ ID NO: 29686 - RNA, 20 nt, Artificial Sequence
  HTT spacer sequence TTCN PAM
cuccccagggaggcagcucu

SEQ ID NO: 29687 - RNA, 20 nt, Artificial Sequence
  HTT spacer sequence TTCN PAM
cagccaggaggaggcccuag

SEQ ID NO: 29688 - RNA, 20 nt, Artificial Sequence
  HTT spacer sequence TTCN PAM
ccugggggcucuggggaggc

SEQ ID NO: 29689 - RNA, 20 nt, Artificial Sequence
  HTT spacer sequence TTCN PAM
ccccucugaggaaggaccug

SEQ ID NO: 29690 - RNA, 20 nt, Artificial Sequence
  HTT spacer sequence TTCN PAM
ucagaggggugaauggcucu

SEQ ID NO: 29691 - RNA, 20 nt, Artificial Sequence
  HTT spacer sequence TTCN PAM
gcccccggccaggucacccc

SEQ ID NO: 29692 - RNA, 20 nt, Artificial Sequence
  HTT spacer sequence TTCN PAM
ccaccugcaaacucccgccu

SEQ ID NO: 29693 - RNA, 20 nt, Artificial Sequence
  HTT spacer sequence TTCN PAM
uccagccguuccccaccugc

SEQ ID NO: 29694 - RNA, 20 nt, Artificial Sequence
  HTT spacer sequence TTCN PAM
acgaguuccuccagccguuc

SEQ ID NO: 29695 - RNA, 20 nt, Artificial Sequence
  HTT spacer sequence TTCN PAM
gcugcagccucagcagaggu

SEQ ID NO: 29696 - RNA, 20 nt, Artificial Sequence
  HTT spacer sequence TTCN PAM
ucccucggagccagccuguc

SEQ ID NO: 29697 - RNA, 20 nt, Artificial Sequence
  HTT spacer sequence TTCN PAM
caaggccaggccgcccacag

SEQ ID NO: 29698 - RNA, 20 nt, Artificial Sequence
  HTT spacer sequence TTCN PAM
cggcaggccgggcccaccgc

SEQ ID NO: 29699 - RNA, 20 nt, Artificial Sequence
  HTT spacer sequence TTCN PAM
gagaggcccagugaggacaa

SEQ ID NO: 29700 - RNA, 20 nt, Artificial Sequence
  HTT spacer sequence TTCN PAM
caggccccucacaacgcucc

SEQ ID NO: 29701 - RNA, 20 nt, Artificial Sequence
  HTT spacer sequence TTCN PAM
ggucacccaggcccccucug

SEQ ID NO: 29702 - RNA, 20 nt, Artificial Sequence
  HTT spacer sequence TTCN PAM
caggcugaggaggaacacac

SEQ ID NO: 29703 - RNA, 20 nt, Artificial Sequence
  HTT spacer sequence TTCN PAM
uccucagccugggaacccca

SEQ ID NO: 29704 - RNA, 20 nt, Artificial Sequence
  HTT spacer sequence TTCN PAM
ccaacccggggucuggccca

SEQ ID NO: 29705 - RNA, 20 nt, Artificial Sequence
  HTT spacer sequence TTCN PAM
uccuucuuuuugccucucug

SEQ ID NO: 29706 - RNA, 20 nt, Artificial Sequence
  HTT spacer sequence TTCN PAM
uucuuuuugccucucuguca

SEQ ID NO: 29707 - RNA, 20 nt, Artificial Sequence
  HTT spacer sequence TTCN PAM
uuuugccucucugucagcac

SEQ ID NO: 29708 - RNA, 20 nt, Artificial Sequence
  HTT spacer sequence TTCN PAM
uguugccucccucuugcucc

SEQ ID NO: 29709 - RNA, 20 nt, Artificial Sequence
  HTT spacer sequence TTCN PAM
ccuguccggccagagacccc

SEQ ID NO: 29710 - RNA, 20 nt, Artificial Sequence
  HTT spacer sequence TTCN PAM
uccuggggccacucacaggc

SEQ ID NO: 29711 - RNA, 20 nt, Artificial Sequence
  HTT spacer sequence TTCN PAM
ugucuaggcugggucuuguc

SEQ ID NO: 29712 - RNA, 20 nt, Artificial Sequence
  HTT spacer sequence TTCN PAM
uuaguaaauuuuagguuggc

SEQ ID NO: 29713 - RNA, 20 nt, Artificial Sequence
  HTT spacer sequence TTCN PAM
ugucauuuuuuauuccuuag

SEQ ID NO: 29714 - RNA, 20 nt, Artificial Sequence
  HTT spacer sequence TTCN PAM
gcuucuugucauuuuuuauu

SEQ ID NO: 29715 - RNA, 20 nt, Artificial Sequence
  HTT spacer sequence TTCN PAM
cuugccuucugcuucuuguc

SEQ ID NO: 29716 - RNA, 20 nt, Artificial Sequence
  HTT spacer sequence TTCN PAM
auucccuugccuucugcuuc

SEQ ID NO: 29717 - RNA, 20 nt, Artificial Sequence
  HTT spacer sequence TTCN PAM
uuuuuacucucuggguuuau

SEQ ID NO: 29718 - RNA, 20 nt, Artificial Sequence
  HTT spacer sequence TTCN PAM
cggauguuguucguuuuuac

SEQ ID NO: 29719 - RNA, 20 nt, Artificial Sequence
  HTT spacer sequence TTCN PAM
aacauggguuuuuuucccgg

SEQ ID NO: 29720 - RNA, 20 nt, Artificial Sequence
  HTT spacer sequence TTCN PAM
agaccagccugaccaccgug

SEQ ID NO: 29721 - RNA, 20 nt, Artificial Sequence
  HTT spacer sequence TTCN PAM
ccacgguggucaggcugguc

SEQ ID NO: 29722 - RNA, 20 nt, Artificial Sequence
  HTT spacer sequence TTCN PAM
cacgucucagccucccgagu

SEQ ID NO: 29723 - RNA, 20 nt, Artificial Sequence
  HTT spacer sequence TTCN PAM
agcaauucucacgucucagc

SEQ ID NO: 29724 - RNA, 20 nt, Artificial Sequence
  HTT spacer sequence TTCN PAM
agaccagccuggccaacaua

SEQ ID NO: 29725 - RNA, 20 nt, Artificial Sequence
  HTT spacer sequence TTCN PAM
cuauguuggccaggcugguc

SEQ ID NO: 29726 - RNA, 20 nt, Artificial Sequence
  HTT spacer sequence TTCN PAM
ccugccucagccuccuauag

SEQ ID NO: 29727 - RNA, 20 nt, Artificial Sequence
  HTT spacer sequence TTCN PAM
agcacuucuccugccucagc

SEQ ID NO: 29728 - RNA, 20 nt, Artificial Sequence
  HTT spacer sequence TTCN PAM
agccugggcaccaaagugag

SEQ ID NO: 29729 - RNA, 20 nt, Artificial Sequence
  HTT spacer sequence TTCN PAM
cuaacguuacgugugugugu

SEQ ID NO: 29730 - RNA, 20 nt, Artificial Sequence
  HTT spacer sequence TTCN PAM
cugugauccuuuuucccuaa

SEQ ID NO: 29731 - RNA, 20 nt, Artificial Sequence
  HTT spacer sequence TTCN PAM
gcugccuuaaugcauucgcu

SEQ ID NO: 29732 - RNA, 20 nt, Artificial Sequence
  HTT spacer sequence TTCN PAM
gcacuugaggguuaggucuu

SEQ ID NO: 29733 - RNA, 20 nt, Artificial Sequence
  HTT spacer sequence TTCN PAM
cucuguccacucauuucagc

SEQ ID NO: 29734 - RNA, 20 nt, Artificial Sequence
  HTT spacer sequence TTCN PAM
uggguaagcgaggggcccaa

SEQ ID NO: 29735 - RNA, 20 nt, Artificial Sequence
  HTT spacer sequence TTCN PAM
uaccguggcggucuuggcgg

SEQ ID NO: 29736 - RNA, 20 nt, Artificial Sequence
  HTT spacer sequence TTCN PAM
cucaucaccgugguacuuuu

SEQ ID NO: 29737 - RNA, 20 nt, Artificial Sequence
  HTT spacer sequence TTCN PAM
cugacuggcgccccuacugc

SEQ ID NO: 29738 - RNA, 20 nt, Artificial Sequence
  HTT spacer sequence TTCN PAM
cuuguuaucucgcccuggug

SEQ ID NO: 29739 - RNA, 20 nt, Artificial Sequence
  HTT spacer sequence TTCN PAM
agggccuagggacccagugc

SEQ ID NO: 29740 - RNA, 20 nt, Artificial Sequence
  HTT spacer sequence TTCN PAM
cucccugagccuugcuccgu

SEQ ID NO: 29741 - RNA, 20 nt, Artificial Sequence
  HTT spacer sequence TTCN PAM
cgccugggcuccagucccag

SEQ ID NO: 29742 - RNA, 20 nt, Artificial Sequence
  HTT spacer sequence TTCN PAM
cugggaugagcuccugggca

SEQ ID NO: 29743 - RNA, 20 nt, Artificial Sequence
  HTT spacer sequence TTCN PAM
aacuaagacccaccucuguc

SEQ ID NO: 29744 - RNA, 20 nt, Artificial Sequence
  HTT spacer sequence TTCN PAM
gacaugagagacagaggugg

SEQ ID NO: 29745 - RNA, 20 nt, Artificial Sequence
  HTT spacer sequence TTCN PAM
cuuaccugcaaccccagggc

SEQ ID NO: 29746 - RNA, 20 nt, Artificial Sequence
  HTT spacer sequence TTCN PAM
acaugaguuagccaagcaug

SEQ ID NO: 29747 - RNA, 20 nt, Artificial Sequence
  HTT spacer sequence TTCN PAM
acccagacacguugacacau

SEQ ID NO: 29748 - RNA, 20 nt, Artificial Sequence
  HTT spacer sequence TTCN PAM
ggccgaguggagugacacug

SEQ ID NO: 29749 - RNA, 20 nt, Artificial Sequence
  HTT spacer sequence TTCN PAM
gugggcucggcuggagucau

SEQ ID NO: 29750 - RNA, 20 nt, Artificial Sequence
  HTT spacer sequence TTCN PAM
accauucccuggccucgguu

SEQ ID NO: 29751 - RNA, 20 nt, Artificial Sequence
  HTT spacer sequence TTCN PAM
cuggccucgguuuccugcuc

SEQ ID NO: 29752 - RNA, 20 nt, Artificial Sequence
  HTT spacer sequence TTCN PAM
ugcucucgguuuccucagcu

SEQ ID NO: 29753 - RNA, 20 nt, Artificial Sequence
  HTT spacer sequence TTCN PAM
ucagcugccugguggguucc

SEQ ID NO: 29754 - RNA, 20 nt, Artificial Sequence
  HTT spacer sequence TTCN PAM
acugcaacucucuggggguc

SEQ ID NO: 29755 - RNA, 20 nt, Artificial Sequence
  HTT spacer sequence TTCN PAM
gucccggcaccgccugcucc

SEQ ID NO: 29756 - RNA, 20 nt, Artificial Sequence
  HTT spacer sequence TTCN PAM
ucauccgagucucugcggau

SEQ ID NO: 29757 - RNA, 20 nt, Artificial Sequence
  HTT spacer sequence TTCN PAM
ccaggaguaacuggggcagu

SEQ ID NO: 29758 - RNA, 20 nt, Artificial Sequence
  HTT spacer sequence TTCN PAM
uugcccgaguuuucucuagg

SEQ ID NO: 29759 - RNA, 20 nt, Artificial Sequence
  HTT spacer sequence TTCN PAM
cuagggugagcaccagacca

SEQ ID NO: 29760 - RNA, 20 nt, Artificial Sequence
  HTT spacer sequence TTCN PAM
ucaagggaaccagcagcauu

SEQ ID NO: 29761 - RNA, 20 nt, Artificial Sequence
  HTT spacer sequence TTCN PAM
agggaaccagcagcauugag

SEQ ID NO: 29762 - RNA, 20 nt, Artificial Sequence
  HTT spacer sequence TTCN PAM
cuugaagaaagaguggucug

SEQ ID NO: 29763 - RNA, 20 nt, Artificial Sequence
  HTT spacer sequence TTCN PAM
caaccagccuccccaggggc

SEQ ID NO: 29764 - RNA, 20 nt, Artificial Sequence
  HTT spacer sequence TTCN PAM
guuuuaaacugaucccaaga

SEQ ID NO: 29765 - RNA, 20 nt, Artificial Sequence
  HTT spacer sequence TTCN PAM
ccaggccuuccuguccugcu

SEQ ID NO: 29766 - RNA, 20 nt, Artificial Sequence
  HTT spacer sequence TTCN PAM
uguccugcugagcugggccc

SEQ ID NO: 29767 - RNA, 20 nt, Artificial Sequence
  HTT spacer sequence TTCN PAM
ucccuguaccccacauggcg

SEQ ID NO: 29768 - RNA, 20 nt, Artificial Sequence
  HTT spacer sequence TTCN PAM
uucugagagugggccugggg

SEQ ID NO: 29769 - RNA, 20 nt, Artificial Sequence
  HTT spacer sequence TTCN PAM
gagagugggccugggguuuc

SEQ ID NO: 29770 - RNA, 20 nt, Artificial Sequence
  HTT spacer sequence TTCN PAM
ccucuccuucuuacccaccc

SEQ ID NO: 29771 - RNA, 20 nt, Artificial Sequence
  HTT spacer sequence TTCN PAM
uacccaccccagagccaggc

SEQ ID NO: 29772 - RNA, 20 nt, Artificial Sequence
  HTT spacer sequence TTCN PAM
ugcugagccuggcucugggg

SEQ ID NO: 29773 - RNA, 20 nt, Artificial Sequence
  HTT spacer sequence TTCN PAM
gggcacccucagguuguguu

SEQ ID NO: 29774 - RNA, 20 nt, Artificial Sequence
  HTT spacer sequence TTCN PAM
cccgauuaggaccucgaggc

SEQ ID NO: 29775 - RNA, 20 nt, Artificial Sequence
  HTT spacer sequence TTCN PAM
gagugcgccagcucugugcc

SEQ ID NO: 29776 - RNA, 20 nt, Artificial Sequence
  HTT spacer sequence TTCN PAM
uugggggcucccugccccuc

SEQ ID NO: 29777 - RNA, 20 nt, Artificial Sequence
  HTT spacer sequence TTCN PAM
cugcccacagucaccucuug

SEQ ID NO: 29778 - RNA, 20 nt, Artificial Sequence
  HTT spacer sequence TTCN PAM
cacccacugugcccguggcc

SEQ ID NO: 29779 - RNA, 20 nt, Artificial Sequence
  HTT spacer sequence TTCN PAM
gcuuccucuagaugaggaag

SEQ ID NO: 29780 - RNA, 20 nt, Artificial Sequence
  HTT spacer sequence TTCN PAM
ucuagaugaggaaggugccc

SEQ ID NO: 29781 - RNA, 20 nt, Artificial Sequence
  HTT spacer sequence TTCN PAM
ucaucuagaggaagcagaag

SEQ ID NO: 29782 - RNA, 20 nt, Artificial Sequence
  HTT spacer sequence TTCN PAM
uaccuaagcacacccccugg

SEQ ID NO: 29783 - RNA, 20 nt, Artificial Sequence
  HTT spacer sequence TTCN PAM
aucucgggggaccccuggcu

SEQ ID NO: 29784 - RNA, 20 nt, Artificial Sequence
  HTT spacer sequence TTCN PAM
uccaucucgggggaccccug

SEQ ID NO: 29785 - RNA, 20 nt, Artificial Sequence
  HTT spacer sequence TTCN PAM
gcacaugagcccaugagcua

SEQ ID NO: 29786 - RNA, 20 nt, Artificial Sequence
  HTT spacer sequence TTCN PAM
agccagcugggguguggacg

SEQ ID NO: 29787 - RNA, 20 nt, Artificial Sequence
  HTT spacer sequence TTCN PAM
ugcugcaggaggcaccuggu

SEQ ID NO: 29788 - RNA, 20 nt, Artificial Sequence
  HTT spacer sequence TTCN PAM
ggcaccaaggacauggggga

SEQ ID NO: 29789 - RNA, 20 nt, Artificial Sequence
  HTT spacer sequence TTCN PAM
guggggagagaucucugcau

SEQ ID NO: 29790 - RNA, 20 nt, Artificial Sequence
  HTT spacer sequence TTCN PAM
gcaugucuguuggcuaucug

SEQ ID NO: 29791 - RNA, 20 nt, Artificial Sequence
  HTT spacer sequence TTCN PAM
cccacacaggcucaguccac

SEQ ID NO: 29792 - RNA, 20 nt, Artificial Sequence
  HTT spacer sequence TTCN PAM
agguggagggcacugcugcu

SEQ ID NO: 29793 - RNA, 20 nt, Artificial Sequence
  HTT spacer sequence TTCN PAM
cucucugcaccuuggcagca

SEQ ID NO: 29794 - RNA, 20 nt, Artificial Sequence
  HTT spacer sequence TTCN PAM
cagugccacaccccuucccu

SEQ ID NO: 29795 - RNA, 20 nt, Artificial Sequence
  HTT spacer sequence TTCN PAM
ggaggccaggcccgcaggca

SEQ ID NO: 29796 - RNA, 20 nt, Artificial Sequence
  HTT spacer sequence TTCN PAM
ugccugcgggccuggccucc

SEQ ID NO: 29797 - RNA, 20 nt, Artificial Sequence
  HTT spacer sequence TTCN PAM
uuccugccugcgggccuggc

SEQ ID NO: 29798 - RNA, 20 nt, Artificial Sequence
  HTT spacer sequence TTCN PAM
ucccuucccuugacacuaga

SEQ ID NO: 29799 - RNA, 20 nt, Artificial Sequence
  HTT spacer sequence TTCN PAM
cuugacacuagagcaagccc

SEQ ID NO: 29800 - RNA, 20 nt, Artificial Sequence
  HTT spacer sequence TTCN PAM
ucacuugagcagugggggug

SEQ ID NO: 29801 - RNA, 20 nt, Artificial Sequence
  HTT spacer sequence TTCN PAM
caccaaagccugcacgcuga

SEQ ID NO: 29802 - RNA, 20 nt, Artificial Sequence
  HTT spacer sequence TTCN PAM
gccugccaaggucacaugca

SEQ ID NO: 29803 - RNA, 20 nt, Artificial Sequence
  HTT spacer sequence TTCN PAM
cugucccucaccgcagccag

SEQ ID NO: 29804 - RNA, 20 nt, Artificial Sequence
  HTT spacer sequence TTCN PAM
ggccaggagaggcgaggcag

SEQ ID NO: 29805 - RNA, 20 nt, Artificial Sequence
  HTT spacer sequence TTCN PAM
uggcucccacccaaggcugg

SEQ ID NO: 29806 - RNA, 20 nt, Artificial Sequence
  HTT spacer sequence TTCN PAM
ccagaguccugauguguggg

SEQ ID NO: 29807 - RNA, 20 nt, Artificial Sequence
  HTT spacer sequence TTCN PAM
caagugauuaaaagguagaa

SEQ ID NO: 29808 - RNA, 20 nt, Artificial Sequence
  HTT spacer sequence TTCN PAM
accuuuuaaucacuugagaa

SEQ ID NO: 29809 - RNA, 20 nt, Artificial Sequence
  HTT spacer sequence TTCN PAM
caaacacugacgaguuucua

SEQ ID NO: 29810 - RNA, 20 nt, Artificial Sequence
  HTT spacer sequence TTCN PAM
ucacaaacacugacgaguuu

SEQ ID NO: 29811 - RNA, 20 nt, Artificial Sequence
  HTT spacer sequence TTCN PAM
guucuucacaaacacugacg

SEQ ID NO: 29812 - RNA, 20 nt, Artificial Sequence
  HTT spacer sequence TTCN PAM
cacuucaguucuucacaaac

SEQ ID NO: 29813 - RNA, 20 nt, Artificial Sequence
  HTT spacer sequence TTCN PAM
cccagacccaccucgccuug

SEQ ID NO: 29814 - RNA, 20 nt, Artificial Sequence
  HTT spacer sequence TTCN PAM
cugucuccagccccaccuca

SEQ ID NO: 29815 - RNA, 20 nt, Artificial Sequence
  HTT spacer sequence TTCN PAM
aggccgaggguggugagggu

SEQ ID NO: 29816 - RNA, 20 nt, Artificial Sequence
  HTT spacer sequence TTCN PAM
agguguggaggcccccgggc

SEQ ID NO: 29817 - RNA, 20 nt, Artificial Sequence
  HTT spacer sequence TTCN PAM
ugagaugggcaugggagucg

SEQ ID NO: 29818 - RNA, 20 nt, Artificial Sequence
  HTT spacer sequence TTCN PAM
uggggacagagacaccaggc

SEQ ID NO: 29819 - RNA, 20 nt, Artificial Sequence
  HTT spacer sequence TTCN PAM
ucucucaggccuggugucuc

SEQ ID NO: 29820 - RNA, 20 nt, Artificial Sequence
  HTT spacer sequence TTCN PAM
cacaucuccggaugccccac

SEQ ID NO: 29821 - RNA, 20 nt, Artificial Sequence
  HTT spacer sequence TTCN PAM
cucugaggacagagcuugag

SEQ ID NO: 29822 - RNA, 20 nt, Artificial Sequence
  HTT spacer sequence TTCN PAM
gagagcaaggccaagcuguu

SEQ ID NO: 29823 - RNA, 20 nt, Artificial Sequence
  HTT spacer sequence TTCN PAM
uaauucccuuuguccguugc

SEQ ID NO: 29824 - RNA, 20 nt, Artificial Sequence
  HTT spacer sequence TTCN PAM
cuuuguccguugcacacagc

SEQ ID NO: 29825 - RNA, 20 nt, Artificial Sequence
  HTT spacer sequence TTCN PAM
cagagcggugcaggguggag

SEQ ID NO: 29826 - RNA, 20 nt, Artificial Sequence
  HTT spacer sequence TTCN PAM
gggcucagaggccccagggg

SEQ ID NO: 29827 - RNA, 20 nt, Artificial Sequence
  HTT spacer sequence TTCN PAM
gggaacacugcugucuccag

SEQ ID NO: 29828 - RNA, 20 nt, Artificial Sequence
  HTT spacer sequence TTCN PAM
cagaagacgcaguguguucg

SEQ ID NO: 29829 - RNA, 20 nt, Artificial Sequence
  HTT spacer sequence TTCN PAM
cuguuuugcagcgagcagcc

SEQ ID NO: 29830 - RNA, 20 nt, Artificial Sequence
  HTT spacer sequence TTCN PAM
acaccccuggaccucugccc

SEQ ID NO: 29831 - RNA, 20 nt, Artificial Sequence
  HTT spacer sequence TTCN PAM
uugaaaaccucucucauuga

SEQ ID NO: 29832 - RNA, 20 nt, Artificial Sequence
  HTT spacer sequence TTCN PAM
aagaacuggagugcagcacg

SEQ ID NO: 29833 - RNA, 20 nt, Artificial Sequence
  HTT spacer sequence TTCN PAM
cucugagcucugaaggaugu

SEQ ID NO: 29834 - RNA, 20 nt, Artificial Sequence
  HTT spacer sequence TTCN PAM
gagcucagagugaaaaaauu

SEQ ID NO: 29835 - RNA, 20 nt, Artificial Sequence
  HTT spacer sequence TTCN PAM
cugucauguccauacaugag

SEQ ID NO: 29836 - RNA, 20 nt, Artificial Sequence
  HTT spacer sequence TTCN PAM
cuuggguccugccaugggcc

SEQ ID NO: 29837 - RNA, 20 nt, Artificial Sequence
  HTT spacer sequence TTCN PAM
gugggacuuggacccguggg

SEQ ID NO: 29838 - RNA, 20 nt, Artificial Sequence
  HTT spacer sequence TTCN PAM
gccaccagcauuaccccaug

SEQ ID NO: 29839 - RNA, 20 nt, Artificial Sequence
  HTT spacer sequence TTCN PAM
gagaagagggcaagguucua

SEQ ID NO: 29840 - RNA, 20 nt, Artificial Sequence
  HTT spacer sequence TTCN PAM
cugaaaucuccaagucaaug

SEQ ID NO: 29841 - RNA, 20 nt, Artificial Sequence
  HTT spacer sequence TTCN PAM
agaugguuccauccucaaag

SEQ ID NO: 29842 - RNA, 20 nt, Artificial Sequence
  HTT spacer sequence TTCN PAM
auccucaaaggaugagggag

SEQ ID NO: 29843 - RNA, 20 nt, Artificial Sequence
  HTT spacer sequence TTCN PAM
auguggaggugacugcaggu

SEQ ID NO: 29844 - RNA, 20 nt, Artificial Sequence
  HTT spacer sequence TTCN PAM
ugcccugggcccccgacacu

SEQ ID NO: 29845 - RNA, 20 nt, Artificial Sequence
  HTT spacer sequence TTCN PAM
cuuccugcccugggcccccg

SEQ ID NO: 29846 - RNA, 20 nt, Artificial Sequence
  HTT spacer sequence TTCN PAM
cuguccacguggauggggug

SEQ ID NO: 29847 - RNA, 20 nt, Artificial Sequence
  HTT spacer sequence TTCN PAM
ccacggcgcagcagcgaggu

SEQ ID NO: 29848 - RNA, 20 nt, Artificial Sequence
  HTT spacer sequence TTCN PAM
uugucucaggccacauucac

SEQ ID NO: 29849 - RNA, 20 nt, Artificial Sequence
  HTT spacer sequence TTCN PAM
ccccuuuggccugcccuucc

SEQ ID NO: 29850 - RNA, 20 nt, Artificial Sequence
  HTT spacer sequence TTCN PAM
ggaggcugugggcaccugcg

SEQ ID NO: 29851 - RNA, 20 nt, Artificial Sequence
  HTT spacer sequence TTCN PAM
uuguucccauguuugucucg

SEQ ID NO: 29852 - RNA, 20 nt, Artificial Sequence
  HTT spacer sequence TTCN PAM
cauguuugucucgugcugaa

SEQ ID NO: 29853 - RNA, 20 nt, Artificial Sequence
  HTT spacer sequence TTCN PAM
gcacgagacaaacaugggaa

SEQ ID NO: 29854 - RNA, 20 nt, Artificial Sequence
  HTT spacer sequence TTCN PAM
ugucuugauaaaaugucacc

SEQ ID NO: 29855 - RNA, 20 nt, Artificial Sequence
  HTT spacer sequence TTCN PAM
cguggagagggacaccagga

SEQ ID NO: 29856 - RNA, 20 nt, Artificial Sequence
  HTT spacer sequence TTCN PAM
cuggacacccugaguucccg

SEQ ID NO: 29857 - RNA, 20 nt, Artificial Sequence
  HTT spacer sequence TTCN PAM
cccucugcacaguggcagcc

SEQ ID NO: 29858 - RNA, 20 nt, Artificial Sequence
  HTT spacer sequence TTCN PAM
ggucaguggagccauucauu

SEQ ID NO: 29859 - RNA, 20 nt, Artificial Sequence
  HTT spacer sequence TTCN PAM
uucagcuccagcugccuuuc

SEQ ID NO: 29860 - RNA, 20 nt, Artificial Sequence
  HTT spacer sequence TTCN PAM
gcuccagcugccuuuccugg

SEQ ID NO: 29861 - RNA, 20 nt, Artificial Sequence
  HTT spacer sequence TTCN PAM
ugguguggguagaagcacgg

SEQ ID NO: 29862 - RNA, 20 nt, Artificial Sequence
  HTT spacer sequence TTCN PAM
acccacaccaggaaaggcag

SEQ ID NO: 29863 - RNA, 20 nt, Artificial Sequence
  HTT spacer sequence TTCN PAM
ccauauauagccgugcuucu

SEQ ID NO: 29864 - RNA, 20 nt, Artificial Sequence
  HTT spacer sequence TTCN PAM
ucaucagaaaccuggugcau

SEQ ID NO: 29865 - RNA, 20 nt, Artificial Sequence
  HTT spacer sequence TTCN PAM
gaugaugaaauaaagcaccu

SEQ ID NO: 29866 - RNA, 20 nt, Artificial Sequence
  HTT spacer sequence TTCN PAM
guuuguuuuuuaaacuaugc

SEQ ID NO: 29867 - RNA, 20 nt, Artificial Sequence
  HTT spacer sequence TTCN PAM
gugacuccgagcugcagcac

SEQ ID NO: 29868 - RNA, 20 nt, Artificial Sequence
  HTT spacer sequence TTCN PAM
ugcuuaggggccggccccca

SEQ ID NO: 29869 - RNA, 20 nt, Artificial Sequence
  HTT spacer sequence TTCN PAM
gcaggaggaagaaggggagc

SEQ ID NO: 29870 - RNA, 20 nt, Artificial Sequence
  HTT spacer sequence TTCN PAM
uccugcagaagcugaguuac

SEQ ID NO: 29871 - RNA, 20 nt, Artificial Sequence
  HTT spacer sequence TTCN PAM
uccuccugcagaagcugagu

SEQ ID NO: 29872 - RNA, 20 nt, Artificial Sequence
  HTT spacer sequence TTCN PAM
ccacgugguccgggcucuuu

SEQ ID NO: 29873 - RNA, 20 nt, Artificial Sequence
  HTT spacer sequence TTCN PAM
ggugagggcgcgggauggug

SEQ ID NO: 29874 - RNA, 20 nt, Artificial Sequence
  HTT spacer sequence TTCN PAM
gcccuggugagccuguggga

SEQ ID NO: 29875 - RNA, 20 nt, Artificial Sequence
  HTT spacer sequence TTCN PAM
cacaggcucaccagggcaga

SEQ ID NO: 29876 - RNA, 20 nt, Artificial Sequence
  HTT spacer sequence TTCN PAM
cccgcucagguggcuucggc

SEQ ID NO: 29877 - RNA, 20 nt, Artificial Sequence
  HTT spacer sequence TTCN PAM
gccgagggaagggggcucac

SEQ ID NO: 29878 - RNA, 20 nt, Artificial Sequence
  HTT spacer sequence TTCN PAM
cucggccgaagccaccugag

SEQ ID NO: 29879 - RNA, 20 nt, Artificial Sequence
  HTT spacer sequence TTCN PAM
cugcccgugcugggccuggg

SEQ ID NO: 29880 - RNA, 20 nt, Artificial Sequence
  HTT spacer sequence TTCN PAM
uccucaucggcuggggacgu

SEQ ID NO: 29881 - RNA, 20 nt, Artificial Sequence
  HTT spacer sequence TTCN PAM
cggcagcaacuuccccgcca

SEQ ID NO: 29882 - RNA, 20 nt, Artificial Sequence
  HTT spacer sequence TTCN PAM
ccgccaggguggauccgccg

SEQ ID NO: 29883 - RNA, 20 nt, Artificial Sequence
  HTT spacer sequence TTCN PAM
ucaucggccucaccauggcc

SEQ ID NO: 29884 - RNA, 20 nt, Artificial Sequence
  HTT spacer sequence TTCN PAM
ccugcuguaggcugggagcg

SEQ ID NO: 29885 - RNA, 20 nt, Artificial Sequence
  HTT spacer sequence TTCN PAM
uggggauggggguugcuucc

SEQ ID NO: 29886 - RNA, 20 nt, Artificial Sequence
  HTT spacer sequence TTCN PAM
cugaagcaggggcguuauuu

SEQ ID NO: 29887 - RNA, 20 nt, Artificial Sequence
  HTT spacer sequence TTCN PAM
gggaagcaacccccaucccc

SEQ ID NO: 29888 - RNA, 20 nt, Artificial Sequence
  HTT spacer sequence TTCN PAM
gggagacagcaggccgucgc

SEQ ID NO: 29889 - RNA, 20 nt, Artificial Sequence
  HTT spacer sequence TTCN PAM
guagguggguccccaucugg

SEQ ID NO: 29890 - RNA, 20 nt, Artificial Sequence
  HTT spacer sequence TTCN PAM
aguucaguaggugggucccc

SEQ ID NO: 29891 - RNA, 20 nt, Artificial Sequence
  HTT spacer sequence TTCN PAM
ucacacaccagcgcuuccag

SEQ ID NO: 29892 - RNA, 20 nt, Artificial Sequence
  HTT spacer sequence TTCN PAM
cgggccuggaguacacgcug

SEQ ID NO: 29893 - RNA, 20 nt, Artificial Sequence
  HTT spacer sequence TTCN PAM
uguucucgggccuggaguac

SEQ ID NO: 29894 - RNA, 20 nt, Artificial Sequence
  HTT spacer sequence TTCN PAM
ucuaccucuuccuguucucg

SEQ ID NO: 29895 - RNA, 20 nt, Artificial Sequence
  HTT spacer sequence TTCN PAM
cagcacgcgccaccucuccc

SEQ ID NO: 29896 - RNA, 20 nt, Artificial Sequence
  HTT spacer sequence TTCN PAM
cugcuguggucgccuucuca

SEQ ID NO: 29897 - RNA, 20 nt, Artificial Sequence
  HTT spacer sequence TTCN PAM
ccgggcggcgcccuucccug

SEQ ID NO: 29898 - RNA, 20 nt, Artificial Sequence
  HTT spacer sequence TTCN PAM
cggcugucgcucguggccag

SEQ ID NO: 29899 - RNA, 20 nt, Artificial Sequence
  HTT spacer sequence TTCN PAM
gugaugcggcugaucugcuc

SEQ ID NO: 29900 - RNA, 20 nt, Artificial Sequence
  HTT spacer sequence TTCN PAM
auagcgauguaaagugcccc

SEQ ID NO: 29901 - RNA, 20 nt, Artificial Sequence
  HTT spacer sequence TTCN PAM
ccaggggcagcgucucuggc

SEQ ID NO: 29902 - RNA, 20 nt, Artificial Sequence
  HTT spacer sequence TTCN PAM
ugccagagacgcugccccug

SEQ ID NO: 29903 - RNA, 20 nt, Artificial Sequence
  HTT spacer sequence TTCN PAM
gcuuccugccagagacgcug

SEQ ID NO: 29904 - RNA, 20 nt, Artificial Sequence
  HTT spacer sequence TTCN PAM
ucuucugcuuccugccagag

SEQ ID NO: 29905 - RNA, 20 nt, Artificial Sequence
  HTT spacer sequence TTCN PAM
cagccuccgaccugcuguuc

SEQ ID NO: 29906 - RNA, 20 nt, Artificial Sequence
  HTT spacer sequence TTCN PAM
aggggcagggaggcuccgag

SEQ ID NO: 29907 - RNA, 20 nt, Artificial Sequence
  HTT spacer sequence TTCN PAM
cccugggcccuaugcucgga

SEQ ID NO: 29908 - RNA, 20 nt, Artificial Sequence
  HTT spacer sequence TTCN PAM
cacugggcuucacccugggc

SEQ ID NO: 29909 - RNA, 20 nt, Artificial Sequence
  HTT spacer sequence TTCN PAM
cuaggcggucauuggggugg

SEQ ID NO: 29910 - RNA, 20 nt, Artificial Sequence
  HTT spacer sequence TTCN PAM
gggccugggucucccugugc

SEQ ID NO: 29911 - RNA, 20 nt, Artificial Sequence
  HTT spacer sequence TTCN PAM
cuuugcugaugcccccaauc

SEQ ID NO: 29912 - RNA, 20 nt, Artificial Sequence
  HTT spacer sequence TTCN PAM
uggccuccaggcugauuggg

SEQ ID NO: 29913 - RNA, 20 nt, Artificial Sequence
  HTT spacer sequence TTCN PAM
aagcaucugagggccacuug

SEQ ID NO: 29914 - RNA, 20 nt, Artificial Sequence
  HTT spacer sequence TTCN PAM
aaauagggcaggguugaggg

SEQ ID NO: 29915 - RNA, 20 nt, Artificial Sequence
  HTT spacer sequence TTCN PAM
cagugccuuccuaggggcca

SEQ ID NO: 29916 - RNA, 20 nt, Artificial Sequence
  HTT spacer sequence TTCN PAM
uaggggccaggagcagcucc

SEQ ID NO: 29917 - RNA, 20 nt, Artificial Sequence
  HTT spacer sequence TTCN PAM
aggagcugcuccuggccccu

SEQ ID NO: 29918 - RNA, 20 nt, Artificial Sequence
  HTT spacer sequence TTCN PAM
agagccaggcuuucaaggag

SEQ ID NO: 29919 - RNA, 20 nt, Artificial Sequence
  HTT spacer sequence TTCN PAM
cgggggaccaguggcuccug

SEQ ID NO: 29920 - RNA, 20 nt, Artificial Sequence
  HTT spacer sequence TTCN PAM
ccaugggcacccaggcccag

SEQ ID NO: 29921 - RNA, 20 nt, Artificial Sequence
  HTT spacer sequence TTCN PAM
ugggccugggugcccauggg

SEQ ID NO: 29922 - RNA, 20 nt, Artificial Sequence
  HTT spacer sequence TTCN PAM
gugugcgccacucacugggg

SEQ ID NO: 29923 - RNA, 20 nt, Artificial Sequence
  HTT spacer sequence TTCN PAM
cuguccugcaguuucugugu

SEQ ID NO: 29924 - RNA, 20 nt, Artificial Sequence
  HTT spacer sequence TTCN PAM
ucaucucuccauuggggccc

SEQ ID NO: 29925 - RNA, 20 nt, Artificial Sequence
  HTT spacer sequence TTCN PAM
gauccuuccucaucucucca

SEQ ID NO: 29926 - RNA, 20 nt, Artificial Sequence
  HTT spacer sequence TTCN PAM
gggcaugaucccuugccucc

SEQ ID NO: 29927 - RNA, 20 nt, Artificial Sequence
  HTT spacer sequence TTCN PAM
cacucccugggcuggcaugu

SEQ ID NO: 29928 - RNA, 20 nt, Artificial Sequence
  HTT spacer sequence TTCN PAM
cgguccuugccuucccacuc

SEQ ID NO: 29929 - RNA, 20 nt, Artificial Sequence
  HTT spacer sequence TTCN PAM
gagguauggcuggcucugug

SEQ ID NO: 29930 - RNA, 20 nt, Artificial Sequence
  HTT spacer sequence TTCN PAM
ccacuggcaucccgauggcg

SEQ ID NO: 29931 - RNA, 20 nt, Artificial Sequence
  HTT spacer sequence TTCN PAM
ucauccccuaggacccccuc

SEQ ID NO: 29932 - RNA, 20 nt, Artificial Sequence
  HTT spacer sequence TTCN PAM
cgcugcugcugccccugcug

SEQ ID NO: 29933 - RNA, 20 nt, Artificial Sequence
  HTT spacer sequence TTCN PAM
cggccuccugcuggaccucc

SEQ ID NO: 29934 - RNA, 20 nt, Artificial Sequence
  HTT spacer sequence TTCN PAM
ccgcuaacccgacccgccgc

SEQ ID NO: 29935 - RNA, 20 nt, Artificial Sequence
  HTT spacer sequence TTCN PAM
ggccugcgcgaugcccccgc

SEQ ID NO: 29936 - RNA, 20 nt, Artificial Sequence
  HTT spacer sequence TTCN PAM
gggcgggggcaucgcgcagg

SEQ ID NO: 29937 - RNA, 20 nt, Artificial Sequence
  HTT spacer sequence TTCN PAM
ugcugccuggguucggggcg

SEQ ID NO: 29938 - RNA, 20 nt, Artificial Sequence
  HTT spacer sequence TTCN PAM
gggauugcacaaaaaauagc

SEQ ID NO: 29939 - RNA, 20 nt, Artificial Sequence
  HTT spacer sequence TTCN PAM
cucgcuguuacgagggcgug

SEQ ID NO: 29940 - RNA, 20 nt, Artificial Sequence
  HTT spacer sequence TTCN PAM
aguuuucucucgcuguuacg

SEQ ID NO: 29941 - RNA, 20 nt, Artificial Sequence
  HTT spacer sequence TTCN PAM
ccgcggcuucaaguuuucuc

SEQ ID NO: 29942 - RNA, 20 nt, Artificial Sequence
  HTT spacer sequence TTCN PAM
ggccccuggcccggacucgg

SEQ ID NO: 29943 - RNA, 20 nt, Artificial Sequence
  HTT spacer sequence TTCN PAM
gcgucugugcgaccguccgu

SEQ ID NO: 29944 - RNA, 20 nt, Artificial Sequence
  HTT spacer sequence TTCN PAM
ggggcguggcguggccgggc

SEQ ID NO: 29945 - RNA, 20 nt, Artificial Sequence
  HTT spacer sequence TTCN PAM
cuuccggccggagucagugg

SEQ ID NO: 29946 - RNA, 20 nt, Artificial Sequence
  HTT spacer sequence TTCN PAM
ggccggagucaguggcgggg

SEQ ID NO: 29947 - RNA, 20 nt, Artificial Sequence
  HTT spacer sequence TTCN PAM
cgccgguccugcgggucgcu

SEQ ID NO: 29948 - RNA, 20 nt, Artificial Sequence
  HTT spacer sequence TTCN PAM
gcuccgcucagggugcugcu

SEQ ID NO: 29949 - RNA, 20 nt, Artificial Sequence
  HTT spacer sequence TTCN PAM
acggggagggccaggcccgc

SEQ ID NO: 29950 - RNA, 20 nt, Artificial Sequence
  HTT spacer sequence TTCN PAM
gggccccacgcuggggggcu

SEQ ID NO: 29951 - RNA, 20 nt, Artificial Sequence
  HTT spacer sequence TTCN PAM
gcucgggcugcgugagcuga

SEQ ID NO: 29952 - RNA, 20 nt, Artificial Sequence
  HTT spacer sequence TTCN PAM
ggcucagcaccaaacgcagc

SEQ ID NO: 29953 - RNA, 20 nt, Artificial Sequence
  HTT spacer sequence TTCN PAM
cccucagccgccuguccugg

SEQ ID NO: 29954 - RNA, 20 nt, Artificial Sequence
  HTT spacer sequence TTCN PAM
caccaucuuucccccucagc

SEQ ID NO: 29955 - RNA, 20 nt, Artificial Sequence
  HTT spacer sequence TTCN PAM
guugucucugcccacccaau

SEQ ID NO: 29956 - RNA, 20 nt, Artificial Sequence
  HTT spacer sequence TTCN PAM
ggugacccagggagcggggc

SEQ ID NO: 29957 - RNA, 20 nt, Artificial Sequence
  HTT spacer sequence TTCN PAM
gggcgcagaagcacccgacc

SEQ ID NO: 29958 - RNA, 20 nt, Artificial Sequence
  HTT spacer sequence TTCN PAM
gcgcccggaaagagcgccag

SEQ ID NO: 29959 - RNA, 20 nt, Artificial Sequence
  HTT spacer sequence TTCN PAM
uccagcgugggucgggugcu

SEQ ID NO: 29960 - RNA, 20 nt, Artificial Sequence
  HTT spacer sequence TTCN PAM
ccugcccagagggaccguuu

SEQ ID NO: 29961 - RNA, 20 nt, Artificial Sequence
  HTT spacer sequence TTCN PAM
gugagugugcuccagccagg

SEQ ID NO: 29962 - RNA, 20 nt, Artificial Sequence
  HTT spacer sequence TTCN PAM
aaaaugcuugcggaucucac

SEQ ID NO: 29963 - RNA, 20 nt, Artificial Sequence
  HTT spacer sequence TTCN PAM
ccauguguaucugguuaggg

SEQ ID NO: 29964 - RNA, 20 nt, Artificial Sequence
  HTT spacer sequence TTCN PAM
uuuccccauguguaucuggu

SEQ ID NO: 29965 - RNA, 20 nt, Artificial Sequence
  HTT spacer sequence TTCN PAM
cuauggaguaaaggcgguau

SEQ ID NO: 29966 - RNA, 20 nt, Artificial Sequence
  HTT spacer sequence TTCN PAM
aauuguggguaagaacaaag

SEQ ID NO: 29967 - RNA, 20 nt, Artificial Sequence
  HTT spacer sequence TTCN PAM
uacccacaauuggaaguucu

SEQ ID NO: 29968 - RNA, 20 nt, Artificial Sequence
  HTT spacer sequence TTCN PAM
uaauagaugcaguuuuccac

SEQ ID NO: 29969 - RNA, 20 nt, Artificial Sequence
  HTT spacer sequence TTCN PAM
accugcagccaaaaagacaa

SEQ ID NO: 29970 - RNA, 20 nt, Artificial Sequence
  HTT spacer sequence TTCN PAM
cagaggacaggcaucucuau

SEQ ID NO: 29971 - RNA, 20 nt, Artificial Sequence
  HTT spacer sequence TTCN PAM
uagagaugccuguccucugg

SEQ ID NO: 29972 - RNA, 20 nt, Artificial Sequence
  HTT spacer sequence TTCN PAM
aaccuccaugcccuccuugu

SEQ ID NO: 29973 - RNA, 20 nt, Artificial Sequence
  HTT spacer sequence TTCN PAM
accugcgugcagcaguaaac

SEQ ID NO: 29974 - RNA, 20 nt, Artificial Sequence
  HTT spacer sequence TTCN PAM
ucccacaguucaaccugcgu

SEQ ID NO: 29975 - RNA, 20 nt, Artificial Sequence
  HTT spacer sequence TTCN PAM
caaaggaaaccuuuccuggg

SEQ ID NO: 29976 - RNA, 20 nt, Artificial Sequence
  HTT spacer sequence TTCN PAM
uuugggaaagggcuguuauc

SEQ ID NO: 29977 - RNA, 20 nt, Artificial Sequence
  HTT spacer sequence TTCN PAM
uggggauuagccugcuuuug

SEQ ID NO: 29978 - RNA, 20 nt, Artificial Sequence
  HTT spacer sequence TTCN PAM
aaucuuguggcuaaucuguu

SEQ ID NO: 29979 - RNA, 20 nt, Artificial Sequence
  HTT spacer sequence TTCN PAM
accguaguuucuaaucuugu

SEQ ID NO: 29980 - RNA, 20 nt, Artificial Sequence
  HTT spacer sequence TTCN PAM
gacccuccccaaacugcucc

SEQ ID NO: 29981 - RNA, 20 nt, Artificial Sequence
  HTT spacer sequence TTCN PAM
ugggugccacaacaucagau

SEQ ID NO: 29982 - RNA, 20 nt, Artificial Sequence
  HTT spacer sequence TTCN PAM
cacugagucaguuccugggu

SEQ ID NO: 29983 - RNA, 20 nt, Artificial Sequence
  HTT spacer sequence TTCN PAM
acucccugugauuucaucuc

SEQ ID NO: 29984 - RNA, 20 nt, Artificial Sequence
  HTT spacer sequence TTCN PAM
ucucugaccugaccaauggg

SEQ ID NO: 29985 - RNA, 20 nt, Artificial Sequence
  HTT spacer sequence TTCN PAM
gacucacuggcugcccccca

SEQ ID NO: 29986 - RNA, 20 nt, Artificial Sequence
  HTT spacer sequence TTCN PAM
cgcagagcuagcuguguggg

SEQ ID NO: 29987 - RNA, 20 nt, Artificial Sequence
  HTT spacer sequence TTCN PAM
cuguugcaaaugcccuuucu

SEQ ID NO: 29988 - RNA, 20 nt, Artificial Sequence
  HTT spacer sequence TTCN PAM
ugauaaauuggcugucuagg

SEQ ID NO: 29989 - RNA, 20 nt, Artificial Sequence
  HTT spacer sequence TTCN PAM
cuguuaccuagacagccaau

SEQ ID NO: 29990 - RNA, 20 nt, Artificial Sequence
  HTT spacer sequence TTCN PAM
ccuucccuguuaccuagaca

SEQ ID NO: 29991 - RNA, 20 nt, Artificial Sequence
  HTT spacer sequence TTCN PAM
agcuggaucacgcgcccucu

SEQ ID NO: 29992 - RNA, 20 nt, Artificial Sequence
  HTT spacer sequence TTCN PAM
augacaugacacgcagcuag

SEQ ID NO: 29993 - RNA, 20 nt, Artificial Sequence
  HTT spacer sequence TTCN PAM
guccuggaucgcauagcaag

SEQ ID NO: 29994 - RNA, 20 nt, Artificial Sequence
  HTT spacer sequence TTCN PAM
guccuguucucguuuccucu

SEQ ID NO: 29995 - RNA, 20 nt, Artificial Sequence
  HTT spacer sequence TTCN PAM
cguuuccucuuugcuuggcc

SEQ ID NO: 29996 - RNA, 20 nt, Artificial Sequence
  HTT spacer sequence TTCN PAM
ucuuugcuuggccaaagagg

SEQ ID NO: 29997 - RNA, 20 nt, Artificial Sequence
  HTT spacer sequence TTCN PAM
ccaagccaagccuuugcacu

SEQ ID NO: 29998 - RNA, 20 nt, Artificial Sequence
  HTT spacer sequence TTCN PAM
cugccacacggcuacugcca

SEQ ID NO: 29999 - RNA, 20 nt, Artificial Sequence
  HTT spacer sequence TTCN PAM
cccaucuacaaauuuucucu

SEQ ID NO: 30000 - RNA, 20 nt, Artificial Sequence
  HTT spacer sequence TTCN PAM
agauuuguggauccgugcac

SEQ ID NO: 30001 - RNA, 20 nt, Artificial Sequence
  HTT spacer sequence TTCN PAM
cccgucagggccugagccuc

SEQ ID NO: 30002 - RNA, 20 nt, Artificial Sequence
  HTT spacer sequence TTCN PAM
gcccagcugccaccagcgcu

SEQ ID NO: 30003 - RNA, 20 nt, Artificial Sequence
  HTT spacer sequence TTCN PAM
agagagagacugacucauuu

SEQ ID NO: 30004 - RNA, 20 nt, Artificial Sequence
  HTT spacer sequence TTCN PAM
agccauggcuggaccagagc

SEQ ID NO: 30005 - RNA, 20 nt, Artificial Sequence
  HTT spacer sequence TTCN PAM
uguugggagguguucaagcc

SEQ ID NO: 30006 - RNA, 20 nt, Artificial Sequence
  HTT spacer sequence TTCN PAM
cccuagcaucuucuuccuug

SEQ ID NO: 30007 - RNA, 20 nt, Artificial Sequence
  HTT spacer sequence TTCN PAM
uccuugcucaaagaucccac

SEQ ID NO: 30008 - RNA, 20 nt, Artificial Sequence
  HTT spacer sequence TTCN PAM
uugcucaaagaucccacacc

SEQ ID NO: 30009 - RNA, 20 nt, Artificial Sequence
  HTT spacer sequence TTCN PAM
aacggggugugggaucuuug

SEQ ID NO: 30010 - RNA, 20 nt, Artificial Sequence
  HTT spacer sequence TTCN PAM
agcuucuaacgggguguggg

SEQ ID NO: 30011 - RNA, 20 nt, Artificial Sequence
  HTT spacer sequence TTCN PAM
ucaccuccccagucguaguc

SEQ ID NO: 30012 - RNA, 20 nt, Artificial Sequence
  HTT spacer sequence TTCN PAM
ggcacguaccagggcagccu

SEQ ID NO: 30013 - RNA, 20 nt, Artificial Sequence
  HTT spacer sequence TTCN PAM
caccucaugagaucacagug

SEQ ID NO: 30014 - RNA, 20 nt, Artificial Sequence
  HTT spacer sequence TTCN PAM
uuccugggaugccggcuaag

SEQ ID NO: 30015 - RNA, 20 nt, Artificial Sequence
  HTT spacer sequence TTCN PAM
ugggaugccggcuaaggaca

SEQ ID NO: 30016 - RNA, 20 nt, Artificial Sequence
  HTT spacer sequence TTCN PAM
guguuugcccuggcuuguag

SEQ ID NO: 30017 - RNA, 20 nt, Artificial Sequence
  HTT spacer sequence TTCN PAM
ccaggggaugacggagcccc

SEQ ID NO: 30018 - RNA, 20 nt, Artificial Sequence
  HTT spacer sequence TTCN PAM
aaugcgguaugcggucuugc

SEQ ID NO: 30019 - RNA, 20 nt, Artificial Sequence
  HTT spacer sequence TTCN PAM
cuguuccaaugcgguaugcg

SEQ ID NO: 30020 - RNA, 20 nt, Artificial Sequence
  HTT spacer sequence TTCN PAM
gcaccucccucagcaaggug

SEQ ID NO: 30021 - RNA, 20 nt, Artificial Sequence
  HTT spacer sequence TTCN PAM
ucguggugcaaggcuuguug

SEQ ID NO: 30022 - RNA, 20 nt, Artificial Sequence
  HTT spacer sequence TTCN PAM
ggauauggcucccuggccag

SEQ ID NO: 30023 - RNA, 20 nt, Artificial Sequence
  HTT spacer sequence TTCN PAM
caagcuggccagggagccau

SEQ ID NO: 30024 - RNA, 20 nt, Artificial Sequence
  HTT spacer sequence TTCN PAM
aggggcucguuacuucuuac

SEQ ID NO: 30025 - RNA, 20 nt, Artificial Sequence
  HTT spacer sequence TTCN PAM
uacagcucacagucccuccc

SEQ ID NO: 30026 - RNA, 20 nt, Artificial Sequence
  HTT spacer sequence TTCN PAM
ccugcacuaaucaagaggga

SEQ ID NO: 30027 - RNA, 20 nt, Artificial Sequence
  HTT spacer sequence TTCN PAM
gauucugaccugaaacugca

SEQ ID NO: 30028 - RNA, 20 nt, Artificial Sequence
  HTT spacer sequence TTCN PAM
gaccugaaacugcaucccag

SEQ ID NO: 30029 - RNA, 20 nt, Artificial Sequence
  HTT spacer sequence TTCN PAM
ggucagaaucagaagaugug

SEQ ID NO: 30030 - RNA, 20 nt, Artificial Sequence
  HTT spacer sequence TTCN PAM
ggacacugcacucucggagg

SEQ ID NO: 30031 - RNA, 20 nt, Artificial Sequence
  HTT spacer sequence TTCN PAM
ccauucaggacacugcacuc

SEQ ID NO: 30032 - RNA, 20 nt, Artificial Sequence
  HTT spacer sequence TTCN PAM
gggugcugggguucuccauu

SEQ ID NO: 30033 - RNA, 20 nt, Artificial Sequence
  HTT spacer sequence TTCN PAM
guggaugcuucugggugcug

SEQ ID NO: 30034 - RNA, 20 nt, Artificial Sequence
  HTT spacer sequence TTCN PAM
agcagagggacuguggguga

SEQ ID NO: 30035 - RNA, 20 nt, Artificial Sequence
  HTT spacer sequence TTCN PAM
cuucucugauuucuaaaaua

SEQ ID NO: 30036 - RNA, 20 nt, Artificial Sequence
  HTT spacer sequence TTCN PAM
cugauuucuaaaauaucugc

SEQ ID NO: 30037 - RNA, 20 nt, Artificial Sequence
  HTT spacer sequence TTCN PAM
aaaauaucugcaaacuuguu

SEQ ID NO: 30038 - RNA, 20 nt, Artificial Sequence
  HTT spacer sequence TTCN PAM
uuuauaauugaaaauauaau

SEQ ID NO: 30039 - RNA, 20 nt, Artificial Sequence
  HTT spacer sequence TTCN PAM
auuauaaaugaaacaaguuu

SEQ ID NO: 30040 - RNA, 20 nt, Artificial Sequence
  HTT spacer sequence TTCN PAM
acacaugaaggcaaacgucc

SEQ ID NO: 30041 - RNA, 20 nt, Artificial Sequence
  HTT spacer sequence TTCN PAM
uguguagaauuuacuguugu

SEQ ID NO: 30042 - RNA, 20 nt, Artificial Sequence
  HTT spacer sequence TTCN PAM
gucaaccacggacguuugcc

SEQ ID NO: 30043 - RNA, 20 nt, Artificial Sequence
  HTT spacer sequence TTCN PAM
ggccaguguaauuucuguca

SEQ ID NO: 30044 - RNA, 20 nt, Artificial Sequence
  HTT spacer sequence TTCN PAM
cugcgucuggacaagccuca

SEQ ID NO: 30045 - RNA, 20 nt, Artificial Sequence
  HTT spacer sequence TTCN PAM
cgaucccagaggugcauuuc

SEQ ID NO: 30046 - RNA, 20 nt, Artificial Sequence
  HTT spacer sequence TTCN PAM
ggauucauucuauuucauca

SEQ ID NO: 30047 - RNA, 20 nt, Artificial Sequence
  HTT spacer sequence TTCN PAM
uucuauuucaucaggugacg

SEQ ID NO: 30048 - RNA, 20 nt, Artificial Sequence
  HTT spacer sequence TTCN PAM
auuucaucaggugacguuuu

SEQ ID NO: 30049 - RNA, 20 nt, Artificial Sequence
  HTT spacer sequence TTCN PAM
ucaggugacguuuuaacaga

SEQ ID NO: 30050 - RNA, 20 nt, Artificial Sequence
  HTT spacer sequence TTCN PAM
guuaaaacgucaccugauga

SEQ ID NO: 30051 - RNA, 20 nt, Artificial Sequence
  HTT spacer sequence TTCN PAM
aaccuccagcuccccccacc

SEQ ID NO: 30052 - RNA, 20 nt, Artificial Sequence
  HTT spacer sequence TTCN PAM
gguuguagccucgaguuugg

SEQ ID NO: 30053 - RNA, 20 nt, Artificial Sequence
  HTT spacer sequence TTCN PAM
uuaacaguggcuuucugguu

SEQ ID NO: 30054 - RNA, 20 nt, Artificial Sequence
  HTT spacer sequence TTCN PAM
cuccguagucaucugcucaa

SEQ ID NO: 30055 - RNA, 20 nt, Artificial Sequence
  HTT spacer sequence TTCN PAM
gcaguugagcagaugacuac

SEQ ID NO: 30056 - RNA, 20 nt, Artificial Sequence
  HTT spacer sequence TTCN PAM
caccccggcuggucaaagug

SEQ ID NO: 30057 - RNA, 20 nt, Artificial Sequence
  HTT spacer sequence TTCN PAM
gugggacaggcuugcucuuc

SEQ ID NO: 30058 - RNA, 20 nt, Artificial Sequence
  HTT spacer sequence TTCN PAM
cacaggucagcggccggcag

SEQ ID NO: 30059 - RNA, 20 nt, Artificial Sequence
  HTT spacer sequence TTCN PAM
ggcuuuccauuucggucagu

SEQ ID NO: 30060 - RNA, 20 nt, Artificial Sequence
  HTT spacer sequence TTCN PAM
auuucggucagugugcucug

SEQ ID NO: 30061 - RNA, 20 nt, Artificial Sequence
  HTT spacer sequence TTCN PAM
gucagugugcucugacacag

SEQ ID NO: 30062 - RNA, 20 nt, Artificial Sequence
  HTT spacer sequence TTCN PAM
ggagcugugucagagcacac

SEQ ID NO: 30063 - RNA, 20 nt, Artificial Sequence
  HTT spacer sequence TTCN PAM
uguuuuucaggagcuguguc

SEQ ID NO: 30064 - RNA, 20 nt, Artificial Sequence
  HTT spacer sequence TTCN PAM
guggugucaaggcagcguga

SEQ ID NO: 30065 - RNA, 20 nt, Artificial Sequence
  HTT spacer sequence TTCN PAM
ggcugugccaggacuugagc

SEQ ID NO: 30066 - RNA, 20 nt, Artificial Sequence
  HTT spacer sequence TTCN PAM
uuccggcugugccaggacuu

SEQ ID NO: 30067 - RNA, 20 nt, Artificial Sequence
  HTT spacer sequence TTCN PAM
ugaagagggagggccguggg

SEQ ID NO: 30068 - RNA, 20 nt, Artificial Sequence
  HTT spacer sequence TTCN PAM
agaagacaguggcuuuacuu

SEQ ID NO: 30069 - RNA, 20 nt, Artificial Sequence
  HTT spacer sequence TTCN PAM
gagagugcucucaggggcca

SEQ ID NO: 30070 - RNA, 20 nt, Artificial Sequence
  HTT spacer sequence TTCN PAM
ggcugugaggagcacaggcu

SEQ ID NO: 30071 - RNA, 20 nt, Artificial Sequence
  HTT spacer sequence TTCN PAM
guugacguuucuggcuguga

SEQ ID NO: 30072 - RNA, 20 nt, Artificial Sequence
  HTT spacer sequence TTCN PAM
cagacaaacuuggcacgaaa

SEQ ID NO: 30073 - RNA, 20 nt, Artificial Sequence
  HTT spacer sequence TTCN PAM
ugccaaguuugucugggaaa

SEQ ID NO: 30074 - RNA, 20 nt, Artificial Sequence
  HTT spacer sequence TTCN PAM
cuucauauuugugauuuugc

SEQ ID NO: 30075 - RNA, 20 nt, Artificial Sequence
  HTT spacer sequence TTCN PAM
uauuugugauuuugcaaaga

SEQ ID NO: 30076 - RNA, 20 nt, Artificial Sequence
  HTT spacer sequence TTCN PAM
cggccacuagggugcucugc

SEQ ID NO: 30077 - RNA, 20 nt, Artificial Sequence
  HTT spacer sequence TTCN PAM
acgccaucauggggccucuc

SEQ ID NO: 30078 - RNA, 20 nt, Artificial Sequence
  HTT spacer sequence TTCN PAM
gcagggccaggcccacagcc

SEQ ID NO: 30079 - RNA, 20 nt, Artificial Sequence
  HTT spacer sequence TTCN PAM
acagaggccaaucacauccg

SEQ ID NO: 30080 - RNA, 20 nt, Artificial Sequence
  HTT spacer sequence TTCN PAM
gaguucuucccaagcgcucu

SEQ ID NO: 30081 - RNA, 20 nt, Artificial Sequence
  HTT spacer sequence TTCN PAM
ucccaagcgcucugaaaggg

SEQ ID NO: 30082 - RNA, 20 nt, Artificial Sequence
  HTT spacer sequence TTCN PAM
caagcgcucugaaagggugc

SEQ ID NO: 30083 - RNA, 20 nt, Artificial Sequence
  HTT spacer sequence TTCN PAM
gagcgcuugggaagaacucg

SEQ ID NO: 30084 - RNA, 20 nt, Artificial Sequence
  HTT spacer sequence TTCN PAM
acucuggugcacccuuucag

SEQ ID NO: 30085 - RNA, 20 nt, Artificial Sequence
  HTT spacer sequence TTCN PAM
gguuccacucuggugcaccc

SEQ ID NO: 30086 - RNA, 20 nt, Artificial Sequence
  HTT spacer sequence TTCN PAM
aagugcgacaggacagagau

SEQ ID NO: 30087 - RNA, 20 nt, Artificial Sequence
  HTT spacer sequence TTCN PAM
ggccaucucuguccugucgc

SEQ ID NO: 30088 - RNA, 20 nt, Artificial Sequence
  HTT spacer sequence TTCN PAM
uacaaauauguuauacuuua

SEQ ID NO: 30089 - RNA, 20 nt, Artificial Sequence
  HTT spacer sequence TTCN PAM
uuacauagcaacuccaaaca

SEQ ID NO: 30090 - RNA, 20 nt, Artificial Sequence
  HTT spacer sequence TTCN PAM
ugggauucuuuacauagcaa

SEQ ID NO: 30091 - RNA, 20 nt, Artificial Sequence
  HTT spacer sequence TTCN PAM
ucuugggauucuuuacauag

SEQ ID NO: 30092 - RNA, 20 nt, Artificial Sequence
  HTT spacer sequence TTCN PAM
uggaguauguggcuuugucc

SEQ ID NO: 30093 - RNA, 20 nt, Artificial Sequence
  HTT spacer sequence TTCN PAM
ugugcugccuguuccuggag

SEQ ID NO: 30094 - RNA, 20 nt, Artificial Sequence
  HTT spacer sequence TTCN PAM
ccacguccuggagggacagg

SEQ ID NO: 30095 - RNA, 20 nt, Artificial Sequence
  HTT spacer sequence TTCN PAM
agugccccauccugucccuc

SEQ ID NO: 30096 - RNA, 20 nt, Artificial Sequence
  HTT spacer sequence TTCN PAM
uuuccagugccccauccugu

SEQ ID NO: 30097 - RNA, 20 nt, Artificial Sequence
  HTT spacer sequence TTCN PAM
cuccacaugcggcagggguc

SEQ ID NO: 30098 - RNA, 20 nt, Artificial Sequence
  HTT spacer sequence TTCN PAM
ggcacccaguggugaccccu

SEQ ID NO: 30099 - RNA, 20 nt, Artificial Sequence
  HTT spacer sequence TTCN PAM
gacuucuggcacccaguggu

SEQ ID NO: 30100 - RNA, 20 nt, Artificial Sequence
  HTT spacer sequence TTCN PAM
aacuuccgacuucuggcacc

SEQ ID NO: 30101 - RNA, 20 nt, Artificial Sequence
  HTT spacer sequence TTCN PAM
aauaaaugagcuggaaagaa

SEQ ID NO: 30102 - RNA, 20 nt, Artificial Sequence
  HTT spacer sequence TTCN PAM
agcucauuuauuugaaaauc

SEQ ID NO: 30103 - RNA, 20 nt, Artificial Sequence
  HTT spacer sequence TTCN PAM
uuccagcucauuuauuugaa

SEQ ID NO: 30104 - RNA, 20 nt, Artificial Sequence
  HTT spacer sequence TTCN PAM
uuaaccugugguaacacuuu

SEQ ID NO: 30105 - RNA, 20 nt, Artificial Sequence
  HTT spacer sequence TTCN PAM
guggcaggggcagugccuag

SEQ ID NO: 30106 - RNA, 20 nt, Artificial Sequence
  HTT spacer sequence TTCN PAM
gucuaggcacugccccugcc

SEQ ID NO: 30107 - RNA, 20 nt, Artificial Sequence
  HTT spacer sequence TTCN PAM
uccaucucaugcaucgcauc

SEQ ID NO: 30108 - RNA, 20 nt, Artificial Sequence
  HTT spacer sequence TTCN PAM
aucucaugcaucgcaucucg

SEQ ID NO: 30109 - RNA, 20 nt, Artificial Sequence
  HTT spacer sequence TTCN PAM
ccgagaugcgaugcaugaga

SEQ ID NO: 30110 - RNA, 20 nt, Artificial Sequence
  HTT spacer sequence TTCN PAM
ggaaacaucuggcaaagaug

SEQ ID NO: 30111 - RNA, 20 nt, Artificial Sequence
  HTT spacer sequence TTCN PAM
ugaaucugcaagugacgcua

SEQ ID NO: 30112 - RNA, 20 nt, Artificial Sequence
  HTT spacer sequence TTCN PAM
gcuuaacaggcacuuauauc

SEQ ID NO: 30113 - RNA, 20 nt, Artificial Sequence
  HTT spacer sequence TTCN PAM
cuccugacuuuacauuucug

SEQ ID NO: 30114 - RNA, 20 nt, Artificial Sequence
  HTT spacer sequence TTCN PAM
uaucuaaagucauucucucc

SEQ ID NO: 30115 - RNA, 20 nt, Artificial Sequence
  HTT spacer sequence TTCN PAM
aaaagaaagccaaacaguuu

SEQ ID NO: 30116 - RNA, 20 nt, Artificial Sequence
  HTT spacer sequence TTCN PAM
uuuggaauacguuggcgauu

SEQ ID NO: 30117 - RNA, 20 nt, Artificial Sequence
  HTT spacer sequence TTCN PAM
gcaggaacaugaauugggaa

SEQ ID NO: 30118 - RNA, 20 nt, Artificial Sequence
  HTT spacer sequence TTCN PAM
ugcagaaacuguuuggcuuu

SEQ ID NO: 30119 - RNA, 20 nt, Artificial Sequence
  HTT spacer sequence TTCN PAM
uguuccugcagaaacuguuu

SEQ ID NO: 30120 - RNA, 20 nt, Artificial Sequence
  HTT spacer sequence TTCN PAM
caauucauguuccugcagaa

SEQ ID NO: 30121 - RNA, 20 nt, Artificial Sequence
  HTT spacer sequence TTCN PAM
aauuuugcuuuguuuccuuc

SEQ ID NO: 30122 - RNA, 20 nt, Artificial Sequence
  HTT spacer sequence TTCN PAM
uucugcgagacucggguggu

SEQ ID NO: 30123 - RNA, 20 nt, Artificial Sequence
  HTT spacer sequence TTCN PAM
gcgagacucgggugguugca

SEQ ID NO: 30124 - RNA, 20 nt, Artificial Sequence
  HTT spacer sequence TTCN PAM
gaauucucuccaccaccaaa

SEQ ID NO: 30125 - RNA, 20 nt, Artificial Sequence
  HTT spacer sequence TTCN PAM
gaagugcaaccacccgaguc

SEQ ID NO: 30126 - RNA, 20 nt, Artificial Sequence
  HTT spacer sequence TTCN PAM
cuccaccaccaaaagcugcu

SEQ ID NO: 30127 - RNA, 20 nt, Artificial Sequence
  HTT spacer sequence TTCN PAM
aucgaucuuccuaacaacag

SEQ ID NO: 30128 - RNA, 20 nt, Artificial Sequence
  HTT spacer sequence TTCN PAM
uaacaacagagaucucaguu

SEQ ID NO: 30129 - RNA, 20 nt, Artificial Sequence
  HTT spacer sequence TTCN PAM
ucauaggauucaggggcuau

SEQ ID NO: 30130 - RNA, 20 nt, Artificial Sequence
  HTT spacer sequence TTCN PAM
ggggcuaucaaaaacacaaa

SEQ ID NO: 30131 - RNA, 20 nt, Artificial Sequence
  HTT spacer sequence TTCN PAM
gugagcugagauugcaccac

SEQ ID NO: 30132 - RNA, 20 nt, Artificial Sequence
  HTT spacer sequence TTCN PAM
gccuccuggguucaagagau

SEQ ID NO: 30133 - RNA, 20 nt, Artificial Sequence
  HTT spacer sequence TTCN PAM
agagauucuccugccccagc

SEQ ID NO: 30134 - RNA, 20 nt, Artificial Sequence
  HTT spacer sequence TTCN PAM
ccugccccagccugcugagu

SEQ ID NO: 30135 - RNA, 20 nt, Artificial Sequence
  HTT spacer sequence TTCN PAM
gggauaaccuuuaugaccug

SEQ ID NO: 30136 - RNA, 20 nt, Artificial Sequence
  HTT spacer sequence TTCN PAM
ucagguucugggauaaccuu

SEQ ID NO: 30137 - RNA, 20 nt, Artificial Sequence
  HTT spacer sequence TTCN PAM
caggugggcaagugcgcggg

SEQ ID NO: 30138 - RNA, 20 nt, Artificial Sequence
  HTT spacer sequence TTCN PAM
agcucuuuccuugccgcuua

SEQ ID NO: 30139 - RNA, 20 nt, Artificial Sequence
  HTT spacer sequence TTCN PAM
uugccgcuuaucaacccuuu

SEQ ID NO: 30140 - RNA, 20 nt, Artificial Sequence
  HTT spacer sequence TTCN PAM
cguuuucuuccucacucucc

SEQ ID NO: 30141 - RNA, 20 nt, Artificial Sequence
  HTT spacer sequence TTCN PAM
uccucacucuccacguugga

SEQ ID NO: 30142 - RNA, 20 nt, Artificial Sequence
  HTT spacer sequence TTCN PAM
ucacucuccacguuggauuc

SEQ ID NO: 30143 - RNA, 20 nt, Artificial Sequence
  HTT spacer sequence TTCN PAM
agguccaaguggcuaucugg

SEQ ID NO: 30144 - RNA, 20 nt, Artificial Sequence
  HTT spacer sequence TTCN PAM
ggcggggaggacacagagga

SEQ ID NO: 30145 - RNA, 20 nt, Artificial Sequence
  HTT spacer sequence TTCN PAM
uccucguugcucucaggguc

SEQ ID NO: 30146 - RNA, 20 nt, Artificial Sequence
  HTT spacer sequence TTCN PAM
ucguugcucucagggucacu

SEQ ID NO: 30147 - RNA, 20 nt, Artificial Sequence
  HTT spacer sequence TTCN PAM
uugcuuugcucuuccuggac

SEQ ID NO: 30148 - RNA, 20 nt, Artificial Sequence
  HTT spacer sequence TTCN PAM
uggacaucuuccucgacauu

SEQ ID NO: 30149 - RNA, 20 nt, Artificial Sequence
  HTT spacer sequence TTCN PAM
ucgacauucaucuuuccauc

SEQ ID NO: 30150 - RNA, 20 nt, Artificial Sequence
  HTT spacer sequence TTCN PAM
ucuuuccauccuaccaagag

SEQ ID NO: 30151 - RNA, 20 nt, Artificial Sequence
  HTT spacer sequence TTCN PAM
auccuaccaagagcguggaa

SEQ ID NO: 30152 - RNA, 20 nt, Artificial Sequence
  HTT spacer sequence TTCN PAM
acgcucuugguaggauggaa

SEQ ID NO: 30153 - RNA, 20 nt, Artificial Sequence
  HTT spacer sequence TTCN PAM
cucucuuuuuuuaauuuaaa

SEQ ID NO: 30154 - RNA, 20 nt, Artificial Sequence
  HTT spacer sequence TTCN PAM
cuuucucucucuuuuuuuaa

SEQ ID NO: 30155 - RNA, 20 nt, Artificial Sequence
  HTT spacer sequence TTCN PAM
uuuucucuuucucucucuuu

SEQ ID NO: 30156 - RNA, 20 nt, Artificial Sequence
  HTT spacer sequence TTCN PAM
uacaaaguaagauguuugcc

SEQ ID NO: 30157 - RNA, 20 nt, Artificial Sequence
  HTT spacer sequence TTCN PAM
ugcuagauaaagaugacagg

SEQ ID NO: 30158 - RNA, 20 nt, Artificial Sequence
  HTT spacer sequence TTCN PAM
gaucaucugcugacauaugu

SEQ ID NO: 30159 - RNA, 20 nt, Artificial Sequence
  HTT spacer sequence TTCN PAM
uaacauuuucauccucaucc

SEQ ID NO: 30160 - RNA, 20 nt, Artificial Sequence
  HTT spacer sequence TTCN PAM
uccucauccuuuccaagcau

SEQ ID NO: 30161 - RNA, 20 nt, Artificial Sequence
  HTT spacer sequence TTCN PAM
aagcauucuucgaagucucu

SEQ ID NO: 30162 - RNA, 20 nt, Artificial Sequence
  HTT spacer sequence TTCN PAM
ucgaagucucucagccugag

SEQ ID NO: 30163 - RNA, 20 nt, Artificial Sequence
  HTT spacer sequence TTCN PAM
aagucucucagccugagcag

SEQ ID NO: 30164 - RNA, 20 nt, Artificial Sequence
  HTT spacer sequence TTCN PAM
aagaaugcuuggaaaggaug

SEQ ID NO: 30165 - RNA, 20 nt, Artificial Sequence
  HTT spacer sequence TTCN PAM
ugcucaggcugagagacuuc

SEQ ID NO: 30166 - RNA, 20 nt, Artificial Sequence
  HTT spacer sequence TTCN PAM
uuccugcucaggcugagaga

SEQ ID NO: 30167 - RNA, 20 nt, Artificial Sequence
  HTT spacer sequence TTCN PAM
ugaggugcuccugcucuucc

SEQ ID NO: 30168 - RNA, 20 nt, Artificial Sequence
  HTT spacer sequence TTCN PAM
uuugccaauucugccuccgu

SEQ ID NO: 30169 - RNA, 20 nt, Artificial Sequence
  HTT spacer sequence TTCN PAM
gccuccgucuucauccuguu

SEQ ID NO: 30170 - RNA, 20 nt, Artificial Sequence
  HTT spacer sequence TTCN PAM
uccuguuagagggcugcgcc

SEQ ID NO: 30171 - RNA, 20 nt, Artificial Sequence
  HTT spacer sequence TTCN PAM
uuucaaagccaagcucgcga

SEQ ID NO: 30172 - RNA, 20 nt, Artificial Sequence
  HTT spacer sequence TTCN PAM
aagccaagcucgcgaaccau

SEQ ID NO: 30173 - RNA, 20 nt, Artificial Sequence
  HTT spacer sequence TTCN PAM
cgagcuuggcuuugaaauga

SEQ ID NO: 30174 - RNA, 20 nt, Artificial Sequence
  HTT spacer sequence TTCN PAM
accuuagcccgaugcauaug

SEQ ID NO: 30175 - RNA, 20 nt, Artificial Sequence
  HTT spacer sequence TTCN PAM
uucuaccuuagcccgaugca

SEQ ID NO: 30176 - RNA, 20 nt, Artificial Sequence
  HTT spacer sequence TTCN PAM
ucuuucuaccuuagcccgau

SEQ ID NO: 30177 - RNA, 20 nt, Artificial Sequence
  HTT spacer sequence TTCN PAM
ucauuuuaaaaauauauuua

SEQ ID NO: 30178 - RNA, 20 nt, Artificial Sequence
  HTT spacer sequence TTCN PAM
uuuuaaaaauauauuuauuu

SEQ ID NO: 30179 - RNA, 20 nt, Artificial Sequence
  HTT spacer sequence TTCN PAM
cucacugagcuugggugacc

SEQ ID NO: 30180 - RNA, 20 nt, Artificial Sequence
  HTT spacer sequence TTCN PAM
guacuuggcucccaccuugg

SEQ ID NO: 30181 - RNA, 20 nt, Artificial Sequence
  HTT spacer sequence TTCN PAM
uuuuugucucuguucucuga

SEQ ID NO: 30182 - RNA, 20 nt, Artificial Sequence
  HTT spacer sequence TTCN PAM
cugacuugggaguuuugugg

SEQ ID NO: 30183 - RNA, 20 nt, Artificial Sequence
  HTT spacer sequence TTCN PAM
gacucuccugucccacaaaa

SEQ ID NO: 30184 - RNA, 20 nt, Artificial Sequence
  HTT spacer sequence TTCN PAM
uuccagucuuggucuagcuu

SEQ ID NO: 30185 - RNA, 20 nt, Artificial Sequence
  HTT spacer sequence TTCN PAM
agucuuggucuagcuucucc

SEQ ID NO: 30186 - RNA, 20 nt, Artificial Sequence
  HTT spacer sequence TTCN PAM
ccgugagcucgagggcaucu

SEQ ID NO: 30187 - RNA, 20 nt, Artificial Sequence
  HTT spacer sequence TTCN PAM
cguugagcuugucucucccu

SEQ ID NO: 30188 - RNA, 20 nt, Artificial Sequence
  HTT spacer sequence TTCN PAM
ccagagggagagacaagcuc

SEQ ID NO: 30189 - RNA, 20 nt, Artificial Sequence
  HTT spacer sequence TTCN PAM
uacucacaauaaaugcuuuu

SEQ ID NO: 30190 - RNA, 20 nt, Artificial Sequence
  HTT spacer sequence TTCN PAM
guaaaagcauuuauugugag

SEQ ID NO: 30191 - RNA, 20 nt, Artificial Sequence
  HTT spacer sequence TTCN PAM
ccacgguaagacaggcucac

SEQ ID NO: 30192 - RNA, 20 nt, Artificial Sequence
  HTT spacer sequence TTCN PAM
ugaucaucuucuccacggua

SEQ ID NO: 30193 - RNA, 20 nt, Artificial Sequence
  HTT spacer sequence TTCN PAM
cuuguuuugacuuggcaaug

SEQ ID NO: 30194 - RNA, 20 nt, Artificial Sequence
  HTT spacer sequence TTCN PAM
aucagcucuuuccgggacuu

SEQ ID NO: 30195 - RNA, 20 nt, Artificial Sequence
  HTT spacer sequence TTCN PAM
gggacuucgguuucucccgc

SEQ ID NO: 30196 - RNA, 20 nt, Artificial Sequence
  HTT spacer sequence TTCN PAM
guuucucccgcuccucgccu

SEQ ID NO: 30197 - RNA, 20 nt, Artificial Sequence
  HTT spacer sequence TTCN PAM
cccgcuccucgccuuccugu

SEQ ID NO: 30198 - RNA, 20 nt, Artificial Sequence
  HTT spacer sequence TTCN PAM
uguugagucuucuugugaag

SEQ ID NO: 30199 - RNA, 20 nt, Artificial Sequence
  HTT spacer sequence TTCN PAM
ugugaaggagcccaccgccu

SEQ ID NO: 30200 - RNA, 20 nt, Artificial Sequence
  HTT spacer sequence TTCN PAM
caagaagacucaacaggaag

SEQ ID NO: 30201 - RNA, 20 nt, Artificial Sequence
  HTT spacer sequence TTCN PAM
gccuuuugcccccagcugag

SEQ ID NO: 30202 - RNA, 20 nt, Artificial Sequence
  HTT spacer sequence TTCN PAM
cugugggguuuucugccuuu

SEQ ID NO: 30203 - RNA, 20 nt, Artificial Sequence
  HTT spacer sequence TTCN PAM
gaagaugcuggaaaugggac

SEQ ID NO: 30204 - RNA, 20 nt, Artificial Sequence
  HTT spacer sequence TTCN PAM
gaacaaagguguacaaaucu

SEQ ID NO: 30205 - RNA, 20 nt, Artificial Sequence
  HTT spacer sequence TTCN PAM
agcaucuucagaacaaaggu

SEQ ID NO: 30206 - RNA, 20 nt, Artificial Sequence
  HTT spacer sequence TTCN PAM
cugagcucauggguagaacg

SEQ ID NO: 30207 - RNA, 20 nt, Artificial Sequence
  HTT spacer sequence TTCN PAM
acccaugagcucagagaaau

SEQ ID NO: 30208 - RNA, 20 nt, Artificial Sequence
  HTT spacer sequence TTCN PAM
aauaaaauaauggauaucaa

SEQ ID NO: 30209 - RNA, 20 nt, Artificial Sequence
  HTT spacer sequence TTCN PAM
ucgauccucagcaucgcugu

SEQ ID NO: 30210 - RNA, 20 nt, Artificial Sequence
  HTT spacer sequence TTCN PAM
cgaugucugccaaagacugg

SEQ ID NO: 30211 - RNA, 20 nt, Artificial Sequence
  HTT spacer sequence TTCN PAM
ucaucuucauuuagauugua

SEQ ID NO: 30212 - RNA, 20 nt, Artificial Sequence
  HTT spacer sequence TTCN PAM
ucuucauuuagauuguagau

SEQ ID NO: 30213 - RNA, 20 nt, Artificial Sequence
  HTT spacer sequence TTCN PAM
uuuagauuguagaugcuuuu

SEQ ID NO: 30214 - RNA, 20 nt, Artificial Sequence
  HTT spacer sequence TTCN PAM
caugaugucgcugacagaag

SEQ ID NO: 30215 - RNA, 20 nt, Artificial Sequence
  HTT spacer sequence TTCN PAM
gucagcgacaucaugagaaa

SEQ ID NO: 30216 - RNA, 20 nt, Artificial Sequence
  HTT spacer sequence TTCN PAM
cuucugucagcgacaucaug

SEQ ID NO: 30217 - RNA, 20 nt, Artificial Sequence
  HTT spacer sequence TTCN PAM
uaaaauuaccacuuccauuu

SEQ ID NO: 30218 - RNA, 20 nt, Artificial Sequence
  HTT spacer sequence TTCN PAM
uuccauaccugcuguuccag

SEQ ID NO: 30219 - RNA, 20 nt, Artificial Sequence
  HTT spacer sequence TTCN PAM
auaccugcuguuccagagca

SEQ ID NO: 30220 - RNA, 20 nt, Artificial Sequence
  HTT spacer sequence TTCN PAM
agagcaaaccucuucaucau

SEQ ID NO: 30221 - RNA, 20 nt, Artificial Sequence
  HTT spacer sequence TTCN PAM
ucaucuucuccucggggcuc

SEQ ID NO: 30222 - RNA, 20 nt, Artificial Sequence
  HTT spacer sequence TTCN PAM
ccucggggcucauguugcug

SEQ ID NO: 30223 - RNA, 20 nt, Artificial Sequence
  HTT spacer sequence TTCN PAM
ccgaagcguuuaucucugaa

SEQ ID NO: 30224 - RNA, 20 nt, Artificial Sequence
  HTT spacer sequence TTCN PAM
gagaauacaacagcaacaug

SEQ ID NO: 30225 - RNA, 20 nt, Artificial Sequence
  HTT spacer sequence TTCN PAM
gagauaaacgcuucggagaa

SEQ ID NO: 30226 - RNA, 20 nt, Artificial Sequence
  HTT spacer sequence TTCN PAM
uuguacucuuuuaguaaagu

SEQ ID NO: 30227 - RNA, 20 nt, Artificial Sequence
  HTT spacer sequence TTCN PAM
agcguacacagacuuuacua

SEQ ID NO: 30228 - RNA, 20 nt, Artificial Sequence
  HTT spacer sequence TTCN PAM
gaccuguuuuccagcguaca

SEQ ID NO: 30229 - RNA, 20 nt, Artificial Sequence
  HTT spacer sequence TTCN PAM
ugugauuuccacuacagggg

SEQ ID NO: 30230 - RNA, 20 nt, Artificial Sequence
  HTT spacer sequence TTCN PAM
aaguuggcuguccuggaggu

SEQ ID NO: 30231 - RNA, 20 nt, Artificial Sequence
  HTT spacer sequence TTCN PAM
accuccaggacagccaacuu

SEQ ID NO: 30232 - RNA, 20 nt, Artificial Sequence
  HTT spacer sequence TTCN PAM
cuaaagaaagcugugagagg

SEQ ID NO: 30233 - RNA, 20 nt, Artificial Sequence
  HTT spacer sequence TTCN PAM
uuagggaauucaaccuccag

SEQ ID NO: 30234 - RNA, 20 nt, Artificial Sequence
  HTT spacer sequence TTCN PAM
ucacccaucucuguccucuc

SEQ ID NO: 30235 - RNA, 20 nt, Artificial Sequence
  HTT spacer sequence TTCN PAM
ucgagcaguacaggcuagca

SEQ ID NO: 30236 - RNA, 20 nt, Artificial Sequence
  HTT spacer sequence TTCN PAM
agcaggaaggggguagaugg

SEQ ID NO: 30237 - RNA, 20 nt, Artificial Sequence
  HTT spacer sequence TTCN PAM
ugcuagaagccagugacacu

SEQ ID NO: 30238 - RNA, 20 nt, Artificial Sequence
  HTT spacer sequence TTCN PAM
cauuaucuggaauaugauuc

SEQ ID NO: 30239 - RNA, 20 nt, Artificial Sequence
  HTT spacer sequence TTCN PAM
agauaaugagaacuaauauu

SEQ ID NO: 30240 - RNA, 20 nt, Artificial Sequence
  HTT spacer sequence TTCN PAM
acauuauugugauucucuuu

SEQ ID NO: 30241 - RNA, 20 nt, Artificial Sequence
  HTT spacer sequence TTCN PAM
cuuucuuucuuaaacuauau

SEQ ID NO: 30242 - RNA, 20 nt, Artificial Sequence
  HTT spacer sequence TTCN PAM
uucuuaaacuauauagaugu

SEQ ID NO: 30243 - RNA, 20 nt, Artificial Sequence
  HTT spacer sequence TTCN PAM
uaaacuauauagauguugug

SEQ ID NO: 30244 - RNA, 20 nt, Artificial Sequence
  HTT spacer sequence TTCN PAM
auaugaugucacaacaucua

SEQ ID NO: 30245 - RNA, 20 nt, Artificial Sequence
  HTT spacer sequence TTCN PAM
uaaaucaguaacuauauuaa

SEQ ID NO: 30246 - RNA, 20 nt, Artificial Sequence
  HTT spacer sequence TTCN PAM
ggcuccccgugcgccccccg

SEQ ID NO: 30247 - RNA, 20 nt, Artificial Sequence
  HTT spacer sequence TTCN PAM
ugagggcccgugcgcgagac

SEQ ID NO: 30248 - RNA, 20 nt, Artificial Sequence
  HTT spacer sequence TTCN PAM
ggcccaggaucuggaacuuc

SEQ ID NO: 30249 - RNA, 20 nt, Artificial Sequence
  HTT spacer sequence TTCN PAM
agauccugggccggaagacg

SEQ ID NO: 30250 - RNA, 20 nt, Artificial Sequence
  HTT spacer sequence TTCN PAM
gccuguuaacuuucaccucg

SEQ ID NO: 30251 - RNA, 20 nt, Artificial Sequence
  HTT spacer sequence TTCN PAM
ccucgaacggauuggaguug

SEQ ID NO: 30252 - RNA, 20 nt, Artificial Sequence
  HTT spacer sequence TTCN PAM
aggugaaaguuaacaggcag

SEQ ID NO: 30253 - RNA, 20 nt, Artificial Sequence
  HTT spacer sequence TTCN PAM
ccgggcccccucgcgcuccc

SEQ ID NO: 30254 - RNA, 20 nt, Artificial Sequence
  HTT spacer sequence TTCN PAM
uucgcgccccgaccuucuuc

SEQ ID NO: 30255 - RNA, 20 nt, Artificial Sequence
  HTT spacer sequence TTCN PAM
cgccccgaccuucuucgccu

SEQ ID NO: 30256 - RNA, 20 nt, Artificial Sequence
  HTT spacer sequence TTCN PAM
ucgccuucgccauggcgcgc

SEQ ID NO: 30257 - RNA, 20 nt, Artificial Sequence
  HTT spacer sequence TTCN PAM
ccuucgccauggcgcgcgcc

SEQ ID NO: 30258 - RNA, 20 nt, Artificial Sequence
  HTT spacer sequence TTCN PAM
ccauggcgcgcgccccgcug

SEQ ID NO: 30259 - RNA, 20 nt, Artificial Sequence
  HTT spacer sequence TTCN PAM
gcggcccggcacgugucuua

SEQ ID NO: 30260 - RNA, 20 nt, Artificial Sequence
  HTT spacer sequence TTCN PAM
ucgucucgcgagaacagcgc

SEQ ID NO: 30261 - RNA, 20 nt, Artificial Sequence
  HTT spacer sequence TTCN PAM
cgcgagacgaggaagcgguu

SEQ ID NO: 30262 - RNA, 20 nt, Artificial Sequence
  HTT spacer sequence TTCN PAM
cgcgagucggaggugcugcg

SEQ ID NO: 30263 - RNA, 20 nt, Artificial Sequence
  HTT spacer sequence TTCN PAM
gggagcuguagugccccggc

SEQ ID NO: 30264 - RNA, 20 nt, Artificial Sequence
  HTT spacer sequence TTCN PAM
gcuaagccguuagcgccgag

SEQ ID NO: 30265 - RNA, 20 nt, Artificial Sequence
  HTT spacer sequence TTCN PAM
uggccccaucgcccucgccu

SEQ ID NO: 30266 - RNA, 20 nt, Artificial Sequence
  HTT spacer sequence TTCN PAM
ucuuggccccaucgcccucg

SEQ ID NO: 30267 - RNA, 20 nt, Artificial Sequence
  HTT spacer sequence TTCN PAM
gcgagaccgaggagacugag

SEQ ID NO: 30268 - RNA, 20 nt, Artificial Sequence
  HTT spacer sequence TTCN PAM
cgagcuccauguccuggcgc

SEQ ID NO: 30269 - RNA, 20 nt, Artificial Sequence
  HTT spacer sequence TTCN PAM
gcagcagcgaguuggccacg

SEQ ID NO: 30270 - RNA, 20 nt, Artificial Sequence
  HTT spacer sequence TTCN PAM
cuaaccauuaaucaagcuau

SEQ ID NO: 30271 - RNA, 20 nt, Artificial Sequence
  HTT spacer sequence TTCN PAM
acuucucuaaccauuaauca

SEQ ID NO: 30272 - RNA, 20 nt, Artificial Sequence
  HTT spacer sequence TTCN PAM
agacuagccugggcaacaua

SEQ ID NO: 30273 - RNA, 20 nt, Artificial Sequence
  HTT spacer sequence TTCN PAM
gccucccaaagugcugggau

SEQ ID NO: 30274 - RNA, 20 nt, Artificial Sequence
  HTT spacer sequence TTCN PAM
aauaucugacagauaagaaa

SEQ ID NO: 30275 - RNA, 20 nt, Artificial Sequence
  HTT spacer sequence TTCN PAM
cugccaacaaaagguuaccc

SEQ ID NO: 30276 - RNA, 20 nt, Artificial Sequence
  HTT spacer sequence TTCN PAM
cuaagcaauaaugucuaccg

SEQ ID NO: 30277 - RNA, 20 nt, Artificial Sequence
  HTT spacer sequence TTCN PAM
uuuggccaggcgcgguggcu

SEQ ID NO: 30278 - RNA, 20 nt, Artificial Sequence
  HTT spacer sequence TTCN PAM
ugagcuuuauauuuugaccc

SEQ ID NO: 30279 - RNA, 20 nt, Artificial Sequence
  HTT spacer sequence TTCN PAM
uuaagguaacuauugccuaa

SEQ ID NO: 30280 - RNA, 20 nt, Artificial Sequence
  HTT spacer sequence TTCN PAM
agaguuuuuugaggagcuuu

SEQ ID NO: 30281 - RNA, 20 nt, Artificial Sequence
  HTT spacer sequence TTCN PAM
uaaguuacuuuuuagcagaa

SEQ ID NO: 30282 - RNA, 20 nt, Artificial Sequence
  HTT spacer sequence TTCN PAM
gcuaaaaaguaacuuaagaa

SEQ ID NO: 30283 - RNA, 20 nt, Artificial Sequence
  HTT spacer sequence TTCN PAM
gucuccaguaaauauguggu

SEQ ID NO: 30284 - RNA, 20 nt, Artificial Sequence
  HTT spacer sequence TTCN PAM
aaaguacaaauuaauagucu

SEQ ID NO: 30285 - RNA, 20 nt, Artificial Sequence
  HTT spacer sequence TTCN PAM
ucaugcuuguuucagcaccu

SEQ ID NO: 30286 - RNA, 20 nt, Artificial Sequence
  HTT spacer sequence TTCN PAM
ugcuuguuucagcaccuuuu

SEQ ID NO: 30287 - RNA, 20 nt, Artificial Sequence
  HTT spacer sequence TTCN PAM
ucauccuuauucauucauuc

SEQ ID NO: 30288 - RNA, 20 nt, Artificial Sequence
  HTT spacer sequence TTCN PAM
uuuccucauccuuauucauu

SEQ ID NO: 30289 - RNA, 20 nt, Artificial Sequence
  HTT spacer sequence TTCN PAM
gauccaggcauaccuaccgu

SEQ ID NO: 30290 - RNA, 20 nt, Artificial Sequence
  HTT spacer sequence TTCN PAM
gcuucagauccaggcauacc

SEQ ID NO: 30291 - RNA, 20 nt, Artificial Sequence
  HTT spacer sequence TTCN PAM
auuuuugggccacuucugcu

SEQ ID NO: 30292 - RNA, 20 nt, Artificial Sequence
  HTT spacer sequence TTCN PAM
uuccauuuuugggccacuuc

SEQ ID NO: 30293 - RNA, 20 nt, Artificial Sequence
  HTT spacer sequence TTCN PAM
uuuccuuccauuuuugggcc

SEQ ID NO: 30294 - RNA, 20 nt, Artificial Sequence
  HTT spacer sequence TTCN PAM
ugccaaguuucuuuuccuuc

SEQ ID NO: 30295 - RNA, 20 nt, Artificial Sequence
  HTT spacer sequence TTCN PAM
ugcuauuccugccaaguuuc

SEQ ID NO: 30296 - RNA, 20 nt, Artificial Sequence
  HTT spacer sequence TTCN PAM
uccugcuauuccugccaagu

SEQ ID NO: 30297 - RNA, 20 nt, Artificial Sequence
  HTT spacer sequence TTCN PAM
ucuuccugcuauuccugcca

SEQ ID NO: 30298 - RNA, 20 nt, Artificial Sequence
  HTT spacer sequence TTCN PAM
auuuuuauaaggauaccaau

SEQ ID NO: 30299 - RNA, 20 nt, Artificial Sequence
  HTT spacer sequence TTCN PAM
ccaguuagccccuaacccuc

SEQ ID NO: 30300 - RNA, 20 nt, Artificial Sequence
  HTT spacer sequence TTCN PAM
uucauucauucaacaaauau

SEQ ID NO: 30301 - RNA, 20 nt, Artificial Sequence
  HTT spacer sequence TTCN PAM
uacauucauucauucauuca

SEQ ID NO: 30302 - RNA, 20 nt, Artificial Sequence
  HTT spacer sequence TTCN PAM
guuucacucaaaaacgguuu

SEQ ID NO: 30303 - RNA, 20 nt, Artificial Sequence
  HTT spacer sequence TTCN PAM
cucaaaaacgguuuauugug

SEQ ID NO: 30304 - RNA, 20 nt, Artificial Sequence
  HTT spacer sequence TTCN PAM
ucccuguaucccuagagcca

SEQ ID NO: 30305 - RNA, 20 nt, Artificial Sequence
  HTT spacer sequence TTCN PAM
ucuguuuuuauucaucccug

SEQ ID NO: 30306 - RNA, 20 nt, Artificial Sequence
  HTT spacer sequence TTCN PAM
gagaagcugacagucaugga

SEQ ID NO: 30307 - RNA, 20 nt, Artificial Sequence
  HTT spacer sequence TTCN PAM
cagaaggagauauucaucug

SEQ ID NO: 30308 - RNA, 20 nt, Artificial Sequence
  HTT spacer sequence TTCN PAM
cugugucugcuugcuucagc

SEQ ID NO: 30309 - RNA, 20 nt, Artificial Sequence
  HTT spacer sequence TTCN PAM
gcccuuuucugccuauaaaa

SEQ ID NO: 30310 - RNA, 20 nt, Artificial Sequence
  HTT spacer sequence TTCN PAM
gccuauaaaaccaaacuccu

SEQ ID NO: 30311 - RNA, 20 nt, Artificial Sequence
  HTT spacer sequence TTCN PAM
augagcuaaacagaggaguu

SEQ ID NO: 30312 - RNA, 20 nt, Artificial Sequence
  HTT spacer sequence TTCN PAM
uucucuuucucucuuucuuu

SEQ ID NO: 30313 - RNA, 20 nt, Artificial Sequence
  HTT spacer sequence TTCN PAM
cuuucucucuuucuuucucu

SEQ ID NO: 30314 - RNA, 20 nt, Artificial Sequence
  HTT spacer sequence TTCN PAM
cucuuucuuucucucucuuu

SEQ ID NO: 30315 - RNA, 20 nt, Artificial Sequence
  HTT spacer sequence TTCN PAM
uucucucucuuucccucccu

SEQ ID NO: 30316 - RNA, 20 nt, Artificial Sequence
  HTT spacer sequence TTCN PAM
cucucuuucccucccuccuc

SEQ ID NO: 30317 - RNA, 20 nt, Artificial Sequence
  HTT spacer sequence TTCN PAM
uuuuuacagcuaaaauugag

SEQ ID NO: 30318 - RNA, 20 nt, Artificial Sequence
  HTT spacer sequence TTCN PAM
caauuuuagcuguaaaaaag

SEQ ID NO: 30319 - RNA, 20 nt, Artificial Sequence
  HTT spacer sequence TTCN PAM
auaaaaccuaguuuauucuc

SEQ ID NO: 30320 - RNA, 20 nt, Artificial Sequence
  HTT spacer sequence TTCN PAM
uaaaagucaguugcuguauu

SEQ ID NO: 30321 - RNA, 20 nt, Artificial Sequence
  HTT spacer sequence TTCN PAM
cacucaauauggaucuuuag

SEQ ID NO: 30322 - RNA, 20 nt, Artificial Sequence
  HTT spacer sequence TTCN PAM
ucccacucaauauggaucuu

SEQ ID NO: 30323 - RNA, 20 nt, Artificial Sequence
  HTT spacer sequence TTCN PAM
cuuuuucuucccacucaaua

SEQ ID NO: 30324 - RNA, 20 nt, Artificial Sequence
  HTT spacer sequence TTCN PAM
ucuuuaaaauuacuuuaugu

SEQ ID NO: 30325 - RNA, 20 nt, Artificial Sequence
  HTT spacer sequence TTCN PAM
ggugcaccuguggcucgcca

SEQ ID NO: 30326 - RNA, 20 nt, Artificial Sequence
  HTT spacer sequence TTCN PAM
ccuuuucgggugcaccugug

SEQ ID NO: 30327 - RNA, 20 nt, Artificial Sequence
  HTT spacer sequence TTCN PAM
uuuccccuuuucgggugcac

SEQ ID NO: 30328 - RNA, 20 nt, Artificial Sequence
  HTT spacer sequence TTCN PAM
ucuuccuuuccccuuuucgg

SEQ ID NO: 30329 - RNA, 20 nt, Artificial Sequence
  HTT spacer sequence TTCN PAM
cauaagcugcuuggaaacag

SEQ ID NO: 30330 - RNA, 20 nt, Artificial Sequence
  HTT spacer sequence TTCN PAM
aagcagcuuaugugaaccuc

SEQ ID NO: 30331 - RNA, 20 nt, Artificial Sequence
  HTT spacer sequence TTCN PAM
uggacucaagagauccagcu

SEQ ID NO: 30332 - RNA, 20 nt, Artificial Sequence
  HTT spacer sequence TTCN PAM
gcauucuagccugggugaca

SEQ ID NO: 30333 - RNA, 20 nt, Artificial Sequence
  HTT spacer sequence TTCN PAM
agccugggugacagagcaag

SEQ ID NO: 30334 - RNA, 20 nt, Artificial Sequence
  HTT spacer sequence TTCN PAM
uuuuugagauagggucuugc

SEQ ID NO: 30335 - RNA, 20 nt, Artificial Sequence
  HTT spacer sequence TTCN PAM
gggguauuugcacauugaga

SEQ ID NO: 30336 - RNA, 20 nt, Artificial Sequence
  HTT spacer sequence TTCN PAM
acccacuuggccuggcaggc

SEQ ID NO: 30337 - RNA, 20 nt, Artificial Sequence
  HTT spacer sequence TTCN PAM
cuacugguccagaucccaug

SEQ ID NO: 30338 - RNA, 20 nt, Artificial Sequence
  HTT spacer sequence TTCN PAM
uccuggacaugggacaagaa

SEQ ID NO: 30339 - RNA, 20 nt, Artificial Sequence
  HTT spacer sequence TTCN PAM
ugcuuacccuccaguugucu

SEQ ID NO: 30340 - RNA, 20 nt, Artificial Sequence
  HTT spacer sequence TTCN PAM
gcaggcagaucaucccaucg

SEQ ID NO: 30341 - RNA, 20 nt, Artificial Sequence
  HTT spacer sequence TTCN PAM
gcagacuggagugagaacuu

SEQ ID NO: 30342 - RNA, 20 nt, Artificial Sequence
  HTT spacer sequence TTCN PAM
gucuaucccuggcuugaagg

SEQ ID NO: 30343 - RNA, 20 nt, Artificial Sequence
  HTT spacer sequence TTCN PAM
agccagggauagacugaagc

SEQ ID NO: 30344 - RNA, 20 nt, Artificial Sequence
  HTT spacer sequence TTCN PAM
cuggggacccugccccuuuc

SEQ ID NO: 30345 - RNA, 20 nt, Artificial Sequence
  HTT spacer sequence TTCN PAM
acccaggagccugucugccu

SEQ ID NO: 30346 - RNA, 20 nt, Artificial Sequence
  HTT spacer sequence TTCN PAM
gcucagugcaggccagggca

SEQ ID NO: 30347 - RNA, 20 nt, Artificial Sequence
  HTT spacer sequence TTCN PAM
cuaucucugcuuucucuugu

SEQ ID NO: 30348 - RNA, 20 nt, Artificial Sequence
  HTT spacer sequence TTCN PAM
uauuucacuaucucugcuuu

SEQ ID NO: 30349 - RNA, 20 nt, Artificial Sequence
  HTT spacer sequence TTCN PAM
cugcucaaugauucagcagc

SEQ ID NO: 30350 - RNA, 20 nt, Artificial Sequence
  HTT spacer sequence TTCN PAM
gcagcuugggcacagaagca

SEQ ID NO: 30351 - RNA, 20 nt, Artificial Sequence
  HTT spacer sequence TTCN PAM
gugcccaagcugcugaauca

SEQ ID NO: 30352 - RNA, 20 nt, Artificial Sequence
  HTT spacer sequence TTCN PAM
guggugcuucugugcccaag

SEQ ID NO: 30353 - RNA, 20 nt, Artificial Sequence
  HTT spacer sequence TTCN PAM
acuuguggaaucuagagggc

SEQ ID NO: 30354 - RNA, 20 nt, Artificial Sequence
  HTT spacer sequence TTCN PAM
acaaguggaaaacaagcaug

SEQ ID NO: 30355 - RNA, 20 nt, Artificial Sequence
  HTT spacer sequence TTCN PAM
cccuagacucauaaucuucc

SEQ ID NO: 30356 - RNA, 20 nt, Artificial Sequence
  HTT spacer sequence TTCN PAM
acauguucacccuagacuca

SEQ ID NO: 30357 - RNA, 20 nt, Artificial Sequence
  HTT spacer sequence TTCN PAM
gggcugcuuauaaguauuua

SEQ ID NO: 30358 - RNA, 20 nt, Artificial Sequence
  HTT spacer sequence TTCN PAM
aaaucuguaaacaagaucua

SEQ ID NO: 30359 - RNA, 20 nt, Artificial Sequence
  HTT spacer sequence TTCN PAM
aaauggcagagcuagugaca

SEQ ID NO: 30360 - RNA, 20 nt, Artificial Sequence
  HTT spacer sequence TTCN PAM
ugauagguacccaaaccacu

SEQ ID NO: 30361 - RNA, 20 nt, Artificial Sequence
  HTT spacer sequence TTCN PAM
guuugagugguuuggguacc

SEQ ID NO: 30362 - RNA, 20 nt, Artificial Sequence
  HTT spacer sequence TTCN PAM
accaauauaucuuaacauuu

SEQ ID NO: 30363 - RNA, 20 nt, Artificial Sequence
  HTT spacer sequence TTCN PAM
uuuaacagucagaaauaucc

SEQ ID NO: 30364 - RNA, 20 nt, Artificial Sequence
  HTT spacer sequence TTCN PAM
cccaaauucaggaggauaug

SEQ ID NO: 30365 - RNA, 20 nt, Artificial Sequence
  HTT spacer sequence TTCN PAM
ggaggauauggcaaaaaaag

SEQ ID NO: 30366 - RNA, 20 nt, Artificial Sequence
  HTT spacer sequence TTCN PAM
auuuuuuacuacgaccacuu

SEQ ID NO: 30367 - RNA, 20 nt, Artificial Sequence
  HTT spacer sequence TTCN PAM
auuggugaguaaauagugcc

SEQ ID NO: 30368 - RNA, 20 nt, Artificial Sequence
  HTT spacer sequence TTCN PAM
ugauuccucucaggaaaaaa

SEQ ID NO: 30369 - RNA, 20 nt, Artificial Sequence
  HTT spacer sequence TTCN PAM
ucucaggaaaaaaaauccuu

SEQ ID NO: 30370 - RNA, 20 nt, Artificial Sequence
  HTT spacer sequence TTCN PAM
ugagaggaaucaugaagaua

SEQ ID NO: 30371 - RNA, 20 nt, Artificial Sequence
  HTT spacer sequence TTCN PAM
gaucugcaguuauaaaguug

SEQ ID NO: 30372 - RNA, 20 nt, Artificial Sequence
  HTT spacer sequence TTCN PAM
uuaaaaauauauauuuuuua

SEQ ID NO: 30373 - RNA, 20 nt, Artificial Sequence
  HTT spacer sequence TTCN PAM
acagacaauaauuggcucgg

SEQ ID NO: 30374 - RNA, 20 nt, Artificial Sequence
  HTT spacer sequence TTCN PAM
ucuacagacaauaauuggcu

SEQ ID NO: 30375 - RNA, 20 nt, Artificial Sequence
  HTT spacer sequence TTCN PAM
agacaguuuucuaugcacgu

SEQ ID NO: 30376 - RNA, 20 nt, Artificial Sequence
  HTT spacer sequence TTCN PAM
augcacguuuuaaaaaauua

SEQ ID NO: 30377 - RNA, 20 nt, Artificial Sequence
  HTT spacer sequence TTCN PAM
uuuaguacuauuguaguucc

SEQ ID NO: 30378 - RNA, 20 nt, Artificial Sequence
  HTT spacer sequence TTCN PAM
uuuuaaagaaagaugaugaa

SEQ ID NO: 30379 - RNA, 20 nt, Artificial Sequence
  HTT spacer sequence TTCN PAM
uuaaaaggaacuacaauagu

SEQ ID NO: 30380 - RNA, 20 nt, Artificial Sequence
  HTT spacer sequence TTCN PAM
ucaucuuucuuuaaaaggaa

SEQ ID NO: 30381 - RNA, 20 nt, Artificial Sequence
  HTT spacer sequence TTCN PAM
ggugguauaaaggagcuagu

SEQ ID NO: 30382 - RNA, 20 nt, Artificial Sequence
  HTT spacer sequence TTCN PAM
cuaaaaguuuacaaaugacc

SEQ ID NO: 30383 - RNA, 20 nt, Artificial Sequence
  HTT spacer sequence TTCN PAM
aaucuuuuauccguuuuaaa

SEQ ID NO: 30384 - RNA, 20 nt, Artificial Sequence
  HTT spacer sequence TTCN PAM
uucuauguucuagauauuag

SEQ ID NO: 30385 - RNA, 20 nt, Artificial Sequence
  HTT spacer sequence TTCN PAM
auguucuagauauuagaugc

SEQ ID NO: 30386 - RNA, 20 nt, Artificial Sequence
  HTT spacer sequence TTCN PAM
agauauuagaugcuuaacag

SEQ ID NO: 30387 - RNA, 20 nt, Artificial Sequence
  HTT spacer sequence TTCN PAM
ccugcuuaucuguuaagcau

SEQ ID NO: 30388 - RNA, 20 nt, Artificial Sequence
  HTT spacer sequence TTCN PAM
ggcgauucuccugcuuaucu

SEQ ID NO: 30389 - RNA, 20 nt, Artificial Sequence
  HTT spacer sequence TTCN PAM
cacucgauacaguaaaaguc

SEQ ID NO: 30390 - RNA, 20 nt, Artificial Sequence
  HTT spacer sequence TTCN PAM
aagccuuacaguucucacuc

SEQ ID NO: 30391 - RNA, 20 nt, Artificial Sequence
  HTT spacer sequence TTCN PAM
auuuguuugcuucuuauccc

SEQ ID NO: 30392 - RNA, 20 nt, Artificial Sequence
  HTT spacer sequence TTCN PAM
uaucccuuugcuucacccag

SEQ ID NO: 30393 - RNA, 20 nt, Artificial Sequence
  HTT spacer sequence TTCN PAM
cccagaaaaggauuauagca

SEQ ID NO: 30394 - RNA, 20 nt, Artificial Sequence
  HTT spacer sequence TTCN PAM
gggugaagcaaagggauaag

SEQ ID NO: 30395 - RNA, 20 nt, Artificial Sequence
  HTT spacer sequence TTCN PAM
uaucgguugcuugucacaaa

SEQ ID NO: 30396 - RNA, 20 nt, Artificial Sequence
  HTT spacer sequence TTCN PAM
ggcaguucugugauaccaaa

SEQ ID NO: 30397 - RNA, 20 nt, Artificial Sequence
  HTT spacer sequence TTCN PAM
gugauaccaaacccacucua

SEQ ID NO: 30398 - RNA, 20 nt, Artificial Sequence
  HTT spacer sequence TTCN PAM
augugccucuuuagaguggg

SEQ ID NO: 30399 - RNA, 20 nt, Artificial Sequence
  HTT spacer sequence TTCN PAM
uggaugcaguggugagcagu

SEQ ID NO: 30400 - RNA, 20 nt, Artificial Sequence
  HTT spacer sequence TTCN PAM
aaagcauaagauuggguggu

SEQ ID NO: 30401 - RNA, 20 nt, Artificial Sequence
  HTT spacer sequence TTCN PAM
aaaaugcugggauuacagca

SEQ ID NO: 30402 - RNA, 20 nt, Artificial Sequence
  HTT spacer sequence TTCN PAM
cuguguuggucaggaugguc

SEQ ID NO: 30403 - RNA, 20 nt, Artificial Sequence
  HTT spacer sequence TTCN PAM
ccugccucagccucccaagu

SEQ ID NO: 30404 - RNA, 20 nt, Artificial Sequence
  HTT spacer sequence TTCN PAM
agugauuccccugccucagc

SEQ ID NO: 30405 - RNA, 20 nt, Artificial Sequence
  HTT spacer sequence TTCN PAM
ugcucauuaaaugaauuagu

SEQ ID NO: 30406 - RNA, 20 nt, Artificial Sequence
  HTT spacer sequence TTCN PAM
uuuaaugagcaagaaauagg

SEQ ID NO: 30407 - RNA, 20 nt, Artificial Sequence
  HTT spacer sequence TTCN PAM
accagagaacuagaacccau

SEQ ID NO: 30408 - RNA, 20 nt, Artificial Sequence
  HTT spacer sequence TTCN PAM
cugguugaauccugacugau

SEQ ID NO: 30409 - RNA, 20 nt, Artificial Sequence
  HTT spacer sequence TTCN PAM
gccugaggacggcagcuuca

SEQ ID NO: 30410 - RNA, 20 nt, Artificial Sequence
  HTT spacer sequence TTCN PAM
uccuccaggaagacucaucu

SEQ ID NO: 30411 - RNA, 20 nt, Artificial Sequence
  HTT spacer sequence TTCN PAM
uccaggaagacucaucucug

SEQ ID NO: 30412 - RNA, 20 nt, Artificial Sequence
  HTT spacer sequence TTCN PAM
uggaggaagaaauucugccu

SEQ ID NO: 30413 - RNA, 20 nt, Artificial Sequence
  HTT spacer sequence TTCN PAM
uaacaccuuccaacugauua

SEQ ID NO: 30414 - RNA, 20 nt, Artificial Sequence
  HTT spacer sequence TTCN PAM
aacugauuaggucagagcca

SEQ ID NO: 30415 - RNA, 20 nt, Artificial Sequence
  HTT spacer sequence TTCN PAM
ccaacaauguuucauuaugu

SEQ ID NO: 30416 - RNA, 20 nt, Artificial Sequence
  HTT spacer sequence TTCN PAM
ucaccaacaauguuucauua

SEQ ID NO: 30417 - RNA, 20 nt, Artificial Sequence
  HTT spacer sequence TTCN PAM
aggccagccugagcaacaua

SEQ ID NO: 30418 - RNA, 20 nt, Artificial Sequence
  HTT spacer sequence TTCN PAM
uucuuuucuuccaucucucc

SEQ ID NO: 30419 - RNA, 20 nt, Artificial Sequence
  HTT spacer sequence TTCN PAM
uuucuuccaucucuccaauc

SEQ ID NO: 30420 - RNA, 20 nt, Artificial Sequence
  HTT spacer sequence TTCN PAM
uccaucucuccaaucaggca

SEQ ID NO: 30421 - RNA, 20 nt, Artificial Sequence
  HTT spacer sequence TTCN PAM
aucucuccaaucaggcagaa

SEQ ID NO: 30422 - RNA, 20 nt, Artificial Sequence
  HTT spacer sequence TTCN PAM
gccugauuggagagauggaa

SEQ ID NO: 30423 - RNA, 20 nt, Artificial Sequence
  HTT spacer sequence TTCN PAM
uauucugccugauuggagag

SEQ ID NO: 30424 - RNA, 20 nt, Artificial Sequence
  HTT spacer sequence TTCN PAM
guccucaucaucggcaacuu

SEQ ID NO: 30425 - RNA, 20 nt, Artificial Sequence
  HTT spacer sequence TTCN PAM
ucaaugauaagguguguuuu

SEQ ID NO: 30426 - RNA, 20 nt, Artificial Sequence
  HTT spacer sequence TTCN PAM
augauaagguguguuuucuu

SEQ ID NO: 30427 - RNA, 20 nt, Artificial Sequence
  HTT spacer sequence TTCN PAM
ucuuuagaauaaaaauuugu

SEQ ID NO: 30428 - RNA, 20 nt, Artificial Sequence
  HTT spacer sequence TTCN PAM
uuagaauaaaaauuuguaga

SEQ ID NO: 30429 - RNA, 20 nt, Artificial Sequence
  HTT spacer sequence TTCN PAM
aaagaagaaaacacaccuua

SEQ ID NO: 30430 - RNA, 20 nt, Artificial Sequence
  HTT spacer sequence TTCN PAM
ggaggcugaggaaggaggau

SEQ ID NO: 30431 - RNA, 20 nt, Artificial Sequence
  HTT spacer sequence TTCN PAM
ucagccucccgaagugcugg

SEQ ID NO: 30432 - RNA, 20 nt, Artificial Sequence
  HTT spacer sequence TTCN PAM
agaucagcauggccaacaua

SEQ ID NO: 30433 - RNA, 20 nt, Artificial Sequence
  HTT spacer sequence TTCN PAM
ucuuuugcauuuuguuugau

SEQ ID NO: 30434 - RNA, 20 nt, Artificial Sequence
  HTT spacer sequence TTCN PAM
ucaugacaucaaacaaaaug

SEQ ID NO: 30435 - RNA, 20 nt, Artificial Sequence
  HTT spacer sequence TTCN PAM
aagagaucuaauuguuaguu

SEQ ID NO: 30436 - RNA, 20 nt, Artificial Sequence
  HTT spacer sequence TTCN PAM
guguauuuaaaguuucagaa

SEQ ID NO: 30437 - RNA, 20 nt, Artificial Sequence
  HTT spacer sequence TTCN PAM
gaauauagaguuggagaauu

SEQ ID NO: 30438 - RNA, 20 nt, Artificial Sequence
  HTT spacer sequence TTCN PAM
gaaacuuuaaauacacugaa

SEQ ID NO: 30439 - RNA, 20 nt, Artificial Sequence
  HTT spacer sequence TTCN PAM
ccaacucuauauucugaaac

SEQ ID NO: 30440 - RNA, 20 nt, Artificial Sequence
  HTT spacer sequence TTCN PAM
uaaaagcuuuaaugggucuu

SEQ ID NO: 30441 - RNA, 20 nt, Artificial Sequence
  HTT spacer sequence TTCN PAM
ucacccagguauuaagcuua

SEQ ID NO: 30442 - RNA, 20 nt, Artificial Sequence
  HTT spacer sequence TTCN PAM
agguguuguugaccuaaaau

SEQ ID NO: 30443 - RNA, 20 nt, Artificial Sequence
  HTT spacer sequence TTCN PAM
uuuuaggucaacaacaccuu

SEQ ID NO: 30444 - RNA, 20 nt, Artificial Sequence
  HTT spacer sequence TTCN PAM
ucauuuuaggucaacaacac

SEQ ID NO: 30445 - RNA, 20 nt, Artificial Sequence
  HTT spacer sequence TTCN PAM
uaguuuuccucucaggguuc

SEQ ID NO: 30446 - RNA, 20 nt, Artificial Sequence
  HTT spacer sequence TTCN PAM
ucucaggguucucaaauauu

SEQ ID NO: 30447 - RNA, 20 nt, Artificial Sequence
  HTT spacer sequence TTCN PAM
caaauauuaaaauucagcca

SEQ ID NO: 30448 - RNA, 20 nt, Artificial Sequence
  HTT spacer sequence TTCN PAM
gccaaauuugaauuuauggu

SEQ ID NO: 30449 - RNA, 20 nt, Artificial Sequence
  HTT spacer sequence TTCN PAM
aauuuggcugaauuuuaaua

SEQ ID NO: 30450 - RNA, 20 nt, Artificial Sequence
  HTT spacer sequence TTCN PAM
uuuaaaccauaaauucaaau

SEQ ID NO: 30451 - RNA, 20 nt, Artificial Sequence
  HTT spacer sequence TTCN PAM
gauacugaaccaauuuugua

SEQ ID NO: 30452 - RNA, 20 nt, Artificial Sequence
  HTT spacer sequence TTCN PAM
auuaauaugguguauuauag

SEQ ID NO: 30453 - RNA, 20 nt, Artificial Sequence
  HTT spacer sequence TTCN PAM
uagauaucauuuaucaggcu

SEQ ID NO: 30454 - RNA, 20 nt, Artificial Sequence
  HTT spacer sequence TTCN PAM
cauuuaaguaugauguuggc

SEQ ID NO: 30455 - RNA, 20 nt, Artificial Sequence
  HTT spacer sequence TTCN PAM
ccuguaauuccagcacuuug

SEQ ID NO: 30456 - RNA, 20 nt, Artificial Sequence
  HTT spacer sequence TTCN PAM
uauauauuagcaauuaaaau

SEQ ID NO: 30457 - RNA, 20 nt, Artificial Sequence
  HTT spacer sequence TTCN PAM
uuuuuuuuggauuuuaauug

SEQ ID NO: 30458 - RNA, 20 nt, Artificial Sequence
  HTT spacer sequence TTCN PAM
uaauuucuuuuuuuuuggau

SEQ ID NO: 30459 - RNA, 20 nt, Artificial Sequence
  HTT spacer sequence TTCN PAM
cuuuguauaguaucaaaaaa

SEQ ID NO: 30460 - RNA, 20 nt, Artificial Sequence
  HTT spacer sequence TTCN PAM
uuuuugauacuauacaaagg

SEQ ID NO: 30461 - RNA, 20 nt, Artificial Sequence
  HTT spacer sequence TTCN PAM
uaaguauuuuauucuuuuuu

SEQ ID NO: 30462 - RNA, 20 nt, Artificial Sequence
  HTT spacer sequence TTCN PAM
uucuuaaguauuuuauucuu

SEQ ID NO: 30463 - RNA, 20 nt, Artificial Sequence
  HTT spacer sequence TTCN PAM
ugagaucuucuuuaauuuuu

SEQ ID NO: 30464 - RNA, 20 nt, Artificial Sequence
  HTT spacer sequence TTCN PAM
auuucuugagaucuucuuua

SEQ ID NO: 30465 - RNA, 20 nt, Artificial Sequence
  HTT spacer sequence TTCN PAM
uggaucagaagacuuaauau

SEQ ID NO: 30466 - RNA, 20 nt, Artificial Sequence
  HTT spacer sequence TTCN PAM
gauccacgaacaggagaugu

SEQ ID NO: 30467 - RNA, 20 nt, Artificial Sequence
  HTT spacer sequence TTCN PAM
aaacuuaguacaaagcuaca

SEQ ID NO: 30468 - RNA, 20 nt, Artificial Sequence
  HTT spacer sequence TTCN PAM
aucaagaccguuuaaugauu

SEQ ID NO: 30469 - RNA, 20 nt, Artificial Sequence
  HTT spacer sequence TTCN PAM
gaaaaauugagacuuuggag

SEQ ID NO: 30470 - RNA, 20 nt, Artificial Sequence
  HTT spacer sequence TTCN PAM
gaaacuaaauagcagguuga

SEQ ID NO: 30471 - RNA, 20 nt, Artificial Sequence
  HTT spacer sequence TTCN PAM
ccauguuggccaggcugguc

SEQ ID NO: 30472 - RNA, 20 nt, Artificial Sequence
  HTT spacer sequence TTCN PAM
agaccagccuggccaacaug

SEQ ID NO: 30473 - RNA, 20 nt, Artificial Sequence
  HTT spacer sequence TTCN PAM
gaauuuccuuuuuuuaaaag

SEQ ID NO: 30474 - RNA, 20 nt, Artificial Sequence
  HTT spacer sequence TTCN PAM
gaaauacgcuacaacuugga

SEQ ID NO: 30475 - RNA, 20 nt, Artificial Sequence
  HTT spacer sequence TTCN PAM
uuuuuuuaaaaggcugaaua

SEQ ID NO: 30476 - RNA, 20 nt, Artificial Sequence
  HTT spacer sequence TTCN PAM
gccuuuuaaaaaaaggaaau

SEQ ID NO: 30477 - RNA, 20 nt, Artificial Sequence
  HTT spacer sequence TTCN PAM
acuguguauauauacugcau

SEQ ID NO: 30478 - RNA, 20 nt, Artificial Sequence
  HTT spacer sequence TTCN PAM
uccacagacaccuggguugu

SEQ ID NO: 30479 - RNA, 20 nt, Artificial Sequence
  HTT spacer sequence TTCN PAM
ccauagcaaaaaacaaccca

SEQ ID NO: 30480 - RNA, 20 nt, Artificial Sequence
  HTT spacer sequence TTCN PAM
uugcagcauaauucaccaua

SEQ ID NO: 30481 - RNA, 20 nt, Artificial Sequence
  HTT spacer sequence TTCN PAM
auucuguguguguguuuuuu

SEQ ID NO: 30482 - RNA, 20 nt, Artificial Sequence
  HTT spacer sequence TTCN PAM
guguguguguuuuuuuguuu

SEQ ID NO: 30483 - RNA, 20 nt, Artificial Sequence
  HTT spacer sequence TTCN PAM
ccauguuggcuggucucaaa

SEQ ID NO: 30484 - RNA, 20 nt, Artificial Sequence
  HTT spacer sequence TTCN PAM
ggugauccacccaccucggc

SEQ ID NO: 30485 - RNA, 20 nt, Artificial Sequence
  HTT spacer sequence TTCN PAM
guucacuaguaaguuaugaa

SEQ ID NO: 30486 - RNA, 20 nt, Artificial Sequence
  HTT spacer sequence TTCN PAM
cuaguaaguuaugaaaucac

SEQ ID NO: 30487 - RNA, 20 nt, Artificial Sequence
  HTT spacer sequence TTCN PAM
uaacuuacuagugaacagaa

SEQ ID NO: 30488 - RNA, 20 nt, Artificial Sequence
  HTT spacer sequence TTCN PAM
gguaaaggggcugccaacuu

SEQ ID NO: 30489 - RNA, 20 nt, Artificial Sequence
  HTT spacer sequence TTCN PAM
gucacaacaucuggagguau

SEQ ID NO: 30490 - RNA, 20 nt, Artificial Sequence
  HTT spacer sequence TTCN PAM
gucccaaucuacauucuguc

SEQ ID NO: 30491 - RNA, 20 nt, Artificial Sequence
  HTT spacer sequence TTCN PAM
ccuccuucagucccaaucua

SEQ ID NO: 30492 - RNA, 20 nt, Artificial Sequence
  HTT spacer sequence TTCN PAM
aaaaaagccuuugaggaaug

SEQ ID NO: 30493 - RNA, 20 nt, Artificial Sequence
  HTT spacer sequence TTCN PAM
ucaaaggcuuuuuuggaagg

SEQ ID NO: 30494 - RNA, 20 nt, Artificial Sequence
  HTT spacer sequence TTCN PAM
ugcugagcccugcauauauu

SEQ ID NO: 30495 - RNA, 20 nt, Artificial Sequence
  HTT spacer sequence TTCN PAM
uccgcugugacaugagugac

SEQ ID NO: 30496 - RNA, 20 nt, Artificial Sequence
  HTT spacer sequence TTCN PAM
cauggcucccugggccuccg

SEQ ID NO: 30497 - RNA, 20 nt, Artificial Sequence
  HTT spacer sequence TTCN PAM
uugcucugagagcaagcaga

SEQ ID NO: 30498 - RNA, 20 nt, Artificial Sequence
  HTT spacer sequence TTCN PAM
cugcacacugaggagcuggg

SEQ ID NO: 30499 - RNA, 20 nt, Artificial Sequence
  HTT spacer sequence TTCN PAM
uuuagugagaauucagcggc

SEQ ID NO: 30500 - RNA, 20 nt, Artificial Sequence
  HTT spacer sequence TTCN PAM
cacuaaaggaauaagcaucu

SEQ ID NO: 30501 - RNA, 20 nt, Artificial Sequence
  HTT spacer sequence TTCN PAM
gcggccaguuccacacccca

SEQ ID NO: 30502 - RNA, 20 nt, Artificial Sequence
  HTT spacer sequence TTCN PAM
acaccccacagauaaauggc

SEQ ID NO: 30503 - RNA, 20 nt, Artificial Sequence
  HTT spacer sequence TTCN PAM
uguuggauauucacauuaau

SEQ ID NO: 30504 - RNA, 20 nt, Artificial Sequence
  HTT spacer sequence TTCN PAM
cauuaaugguauucuagugu

SEQ ID NO: 30505 - RNA, 20 nt, Artificial Sequence
  HTT spacer sequence TTCN PAM
aguguuugugauuugaacug

SEQ ID NO: 30506 - RNA, 20 nt, Artificial Sequence
  HTT spacer sequence TTCN PAM
aaucacaaacacuagaauac

SEQ ID NO: 30507 - RNA, 20 nt, Artificial Sequence
  HTT spacer sequence TTCN PAM
aaaaagaugucucuggcugg

SEQ ID NO: 30508 - RNA, 20 nt, Artificial Sequence
  HTT spacer sequence TTCN PAM
uaucacaauaucccaggacc

SEQ ID NO: 30509 - RNA, 20 nt, Artificial Sequence
  HTT spacer sequence TTCN PAM
uccugucuucaucugggaug

SEQ ID NO: 30510 - RNA, 20 nt, Artificial Sequence
  HTT spacer sequence TTCN PAM
ugucuucaucugggaugcca

SEQ ID NO: 30511 - RNA, 20 nt, Artificial Sequence
  HTT spacer sequence TTCN PAM
ucugggaugccacagaggcc

SEQ ID NO: 30512 - RNA, 20 nt, Artificial Sequence
  HTT spacer sequence TTCN PAM
uggccucuguggcaucccag

SEQ ID NO: 30513 - RNA, 20 nt, Artificial Sequence
  HTT spacer sequence TTCN PAM
guccacgcuuuuguccuuca

SEQ ID NO: 30514 - RNA, 20 nt, Artificial Sequence
  HTT spacer sequence TTCN PAM
caucccucuccugggcaugu

SEQ ID NO: 30515 - RNA, 20 nt, Artificial Sequence
  HTT spacer sequence TTCN PAM
guaaaacagagauaauaauc

SEQ ID NO: 30516 - RNA, 20 nt, Artificial Sequence
  HTT spacer sequence TTCN PAM
ccuucuguaaaacagagaua

SEQ ID NO: 30517 - RNA, 20 nt, Artificial Sequence
  HTT spacer sequence TTCN PAM
guuaucaagcagcaugcuuc

SEQ ID NO: 30518 - RNA, 20 nt, Artificial Sequence
  HTT spacer sequence TTCN PAM
ugggagugagggugucagcu

SEQ ID NO: 30519 - RNA, 20 nt, Artificial Sequence
  HTT spacer sequence TTCN PAM
cuucuugggagugagggugu

SEQ ID NO: 30520 - RNA, 20 nt, Artificial Sequence
  HTT spacer sequence TTCN PAM
auuucacugcuuuuuucauu

SEQ ID NO: 30521 - RNA, 20 nt, Artificial Sequence
  HTT spacer sequence TTCN PAM
cugcuuuuuucauucauucu

SEQ ID NO: 30522 - RNA, 20 nt, Artificial Sequence
  HTT spacer sequence TTCN PAM
uucauucuauuucacuucug

SEQ ID NO: 30523 - RNA, 20 nt, Artificial Sequence
  HTT spacer sequence TTCN PAM
uucuauuucacuucuguuuu

SEQ ID NO: 30524 - RNA, 20 nt, Artificial Sequence
  HTT spacer sequence TTCN PAM
auuucacuucuguuuucacu

SEQ ID NO: 30525 - RNA, 20 nt, Artificial Sequence
  HTT spacer sequence TTCN PAM
cuucuguuuucacuuauagc

SEQ ID NO: 30526 - RNA, 20 nt, Artificial Sequence
  HTT spacer sequence TTCN PAM
guuuucacuuauagcguuag

SEQ ID NO: 30527 - RNA, 20 nt, Artificial Sequence
  HTT spacer sequence TTCN PAM
cuuauagcguuagaaccuaa

SEQ ID NO: 30528 - RNA, 20 nt, Artificial Sequence
  HTT spacer sequence TTCN PAM
agaguugcccauaacuaccu

SEQ ID NO: 30529 - RNA, 20 nt, Artificial Sequence
  HTT spacer sequence TTCN PAM
ccucuuagguaguuaugggc

SEQ ID NO: 30530 - RNA, 20 nt, Artificial Sequence
  HTT spacer sequence TTCN PAM
aaugguuccccucuuaggua

SEQ ID NO: 30531 - RNA, 20 nt, Artificial Sequence
  HTT spacer sequence TTCN PAM
ucaaaugguuccccucuuag

SEQ ID NO: 30532 - RNA, 20 nt, Artificial Sequence
  HTT spacer sequence TTCN PAM
ugguauucuucaaaugguuc

SEQ ID NO: 30533 - RNA, 20 nt, Artificial Sequence
  HTT spacer sequence TTCN PAM
caguuuuuacaauggaaaug

SEQ ID NO: 30534 - RNA, 20 nt, Artificial Sequence
  HTT spacer sequence TTCN PAM
auuguaaaaacugagaaaaa

SEQ ID NO: 30535 - RNA, 20 nt, Artificial Sequence
  HTT spacer sequence TTCN PAM
agccauuuccauuguaaaaa

SEQ ID NO: 30536 - RNA, 20 nt, Artificial Sequence
  HTT spacer sequence TTCN PAM
gccucagccuccugaguagc

SEQ ID NO: 30537 - RNA, 20 nt, Artificial Sequence
  HTT spacer sequence TTCN PAM
aggcuauaguacgggaugau

SEQ ID NO: 30538 - RNA, 20 nt, Artificial Sequence
  HTT spacer sequence TTCN PAM
ucuaauuuaauagacucugu

SEQ ID NO: 30539 - RNA, 20 nt, Artificial Sequence
  HTT spacer sequence TTCN PAM
aauuuaauagacucuguucu

SEQ ID NO: 30540 - RNA, 20 nt, Artificial Sequence
  HTT spacer sequence TTCN PAM
cucuuuuuaaaauggcaggu

SEQ ID NO: 30541 - RNA, 20 nt, Artificial Sequence
  HTT spacer sequence TTCN PAM
guggcuagaaaauaaaacuu

SEQ ID NO: 30542 - RNA, 20 nt, Artificial Sequence
  HTT spacer sequence TTCN PAM
agccacugaaccaacaggga

SEQ ID NO: 30543 - RNA, 20 nt, Artificial Sequence
  HTT spacer sequence TTCN PAM
uuuuucaaaggauggcacaa

SEQ ID NO: 30544 - RNA, 20 nt, Artificial Sequence
  HTT spacer sequence TTCN PAM
aaggauggcacaacguauau

SEQ ID NO: 30545 - RNA, 20 nt, Artificial Sequence
  HTT spacer sequence TTCN PAM
ugccucagccucccgaguag

SEQ ID NO: 30546 - RNA, 20 nt, Artificial Sequence
  HTT spacer sequence TTCN PAM
ucuuuuuuuuuuuuuuuuuu

SEQ ID NO: 30547 - RNA, 20 nt, Artificial Sequence
  HTT spacer sequence TTCN PAM
gcucaaaggggaugcccggg

SEQ ID NO: 30548 - RNA, 20 nt, Artificial Sequence
  HTT spacer sequence TTCN PAM
auaaaugaggcgaagacaag

SEQ ID NO: 30549 - RNA, 20 nt, Artificial Sequence
  HTT spacer sequence TTCN PAM
ccucauuuauugaaccauuc

SEQ ID NO: 30550 - RNA, 20 nt, Artificial Sequence
  HTT spacer sequence TTCN PAM
uuuuuaaaagaacaaugcaa

SEQ ID NO: 30551 - RNA, 20 nt, Artificial Sequence
  HTT spacer sequence TTCN PAM
uuuaaaaaagaaaaguuuac

SEQ ID NO: 30552 - RNA, 20 nt, Artificial Sequence
  HTT spacer sequence TTCN PAM
ggucucacauugcauuguuc

SEQ ID NO: 30553 - RNA, 20 nt, Artificial Sequence
  HTT spacer sequence TTCN PAM
cauugauuaggcaacccgua

SEQ ID NO: 30554 - RNA, 20 nt, Artificial Sequence
  HTT spacer sequence TTCN PAM
uuguuacggguugccuaauc

SEQ ID NO: 30555 - RNA, 20 nt, Artificial Sequence
  HTT spacer sequence TTCN PAM
aggaaaaggcggauuuggag

SEQ ID NO: 30556 - RNA, 20 nt, Artificial Sequence
  HTT spacer sequence TTCN PAM
uagaacucuguaaugucuaa

SEQ ID NO: 30557 - RNA, 20 nt, Artificial Sequence
  HTT spacer sequence TTCN PAM
uagcagcgcugcuagcuggg

SEQ ID NO: 30558 - RNA, 20 nt, Artificial Sequence
  HTT spacer sequence TTCN PAM
caggaccuugcuccccaccc

SEQ ID NO: 30559 - RNA, 20 nt, Artificial Sequence
  HTT spacer sequence TTCN PAM
gguaaugcaucagcucuccc

SEQ ID NO: 30560 - RNA, 20 nt, Artificial Sequence
  HTT spacer sequence TTCN PAM
caaaacacccacuaaggcaa

SEQ ID NO: 30561 - RNA, 20 nt, Artificial Sequence
  HTT spacer sequence TTCN PAM
cacaguuggcaaagauuauu

SEQ ID NO: 30562 - RNA, 20 nt, Artificial Sequence
  HTT spacer sequence TTCN PAM
auguggauucucacaguugg

SEQ ID NO: 30563 - RNA, 20 nt, Artificial Sequence
  HTT spacer sequence TTCN PAM
uaaaaaccuuuugcucaaaa

SEQ ID NO: 30564 - RNA, 20 nt, Artificial Sequence
  HTT spacer sequence TTCN PAM
cuuggugacuucaccuuuua

SEQ ID NO: 30565 - RNA, 20 nt, Artificial Sequence
  HTT spacer sequence TTCN PAM
ccuuuuaccucauaguucug

SEQ ID NO: 30566 - RNA, 20 nt, Artificial Sequence
  HTT spacer sequence TTCN PAM
gaagaagcugguuuccaugc

SEQ ID NO: 30567 - RNA, 20 nt, Artificial Sequence
  HTT spacer sequence TTCN PAM
gaacuaugagguaaaaggug

SEQ ID NO: 30568 - RNA, 20 nt, Artificial Sequence
  HTT spacer sequence TTCN PAM
ucagaacuaugagguaaaag

SEQ ID NO: 30569 - RNA, 20 nt, Artificial Sequence
  HTT spacer sequence TTCN PAM
augcuugaugccccagcuca

SEQ ID NO: 30570 - RNA, 20 nt, Artificial Sequence
  HTT spacer sequence TTCN PAM
aucugggcaaagugacugag

SEQ ID NO: 30571 - RNA, 20 nt, Artificial Sequence
  HTT spacer sequence TTCN PAM
guuuccgcauuguggaauuu

SEQ ID NO: 30572 - RNA, 20 nt, Artificial Sequence
  HTT spacer sequence TTCN PAM
gcauuguggaauuuccauga

SEQ ID NO: 30573 - RNA, 20 nt, Artificial Sequence
  HTT spacer sequence TTCN PAM
acaaugcggaaacagaaucg

SEQ ID NO: 30574 - RNA, 20 nt, Artificial Sequence
  HTT spacer sequence TTCN PAM
augauucuauuuccauacau

SEQ ID NO: 30575 - RNA, 20 nt, Artificial Sequence
  HTT spacer sequence TTCN PAM
auuuccauacauuuaagacu

SEQ ID NO: 30576 - RNA, 20 nt, Artificial Sequence
  HTT spacer sequence TTCN PAM
auacauuuaagacugguccc

SEQ ID NO: 30577 - RNA, 20 nt, Artificial Sequence
  HTT spacer sequence TTCN PAM
cauaguacagagugaauuag

SEQ ID NO: 30578 - RNA, 20 nt, Artificial Sequence
  HTT spacer sequence TTCN PAM
cucuguacuaugugaauuug

SEQ ID NO: 30579 - RNA, 20 nt, Artificial Sequence
  HTT spacer sequence TTCN PAM
aaacaccuuuugauguaggu

SEQ ID NO: 30580 - RNA, 20 nt, Artificial Sequence
  HTT spacer sequence TTCN PAM
caaauugacacauuuccaaa

SEQ ID NO: 30581 - RNA, 20 nt, Artificial Sequence
  HTT spacer sequence TTCN PAM
uuaggauuuucccaaauuga

SEQ ID NO: 30582 - RNA, 20 nt, Artificial Sequence
  HTT spacer sequence TTCN PAM
cucuuguugccuagacugga

SEQ ID NO: 30583 - RNA, 20 nt, Artificial Sequence
  HTT spacer sequence TTCN PAM
agcgauucuccugccucagc

SEQ ID NO: 30584 - RNA, 20 nt, Artificial Sequence
  HTT spacer sequence TTCN PAM
ccugccucagccucccgagu

SEQ ID NO: 30585 - RNA, 20 nt, Artificial Sequence
  HTT spacer sequence TTCN PAM
uauuuuuaguagagaggggg

SEQ ID NO: 30586 - RNA, 20 nt, Artificial Sequence
  HTT spacer sequence TTCN PAM
ccauguuggucagggugguc

SEQ ID NO: 30587 - RNA, 20 nt, Artificial Sequence
  HTT spacer sequence TTCN PAM
agaccacccugaccaacaug

SEQ ID NO: 30588 - RNA, 20 nt, Artificial Sequence
  HTT spacer sequence TTCN PAM
ccauccaccaacuacagugg

SEQ ID NO: 30589 - RNA, 20 nt, Artificial Sequence
  HTT spacer sequence TTCN PAM
ggucuggggauuuaaagaga

SEQ ID NO: 30590 - RNA, 20 nt, Artificial Sequence
  HTT spacer sequence TTCN PAM
agaacuuuuaagucccuaag

SEQ ID NO: 30591 - RNA, 20 nt, Artificial Sequence
  HTT spacer sequence TTCN PAM
ugaacuccauaugaucacuc

SEQ ID NO: 30592 - RNA, 20 nt, Artificial Sequence
  HTT spacer sequence TTCN PAM
aaggaaaagccacuagcauu

SEQ ID NO: 30593 - RNA, 20 nt, Artificial Sequence
  HTT spacer sequence TTCN PAM
uuugaauuguaauaugggag

SEQ ID NO: 30594 - RNA, 20 nt, Artificial Sequence
  HTT spacer sequence TTCN PAM
aggcaaugcuaguggcuuuu

SEQ ID NO: 30595 - RNA, 20 nt, Artificial Sequence
  HTT spacer sequence TTCN PAM
aauuaacuucaaggcaaugc

SEQ ID NO: 30596 - RNA, 20 nt, Artificial Sequence
  HTT spacer sequence TTCN PAM
ugucaugucaagcugcaggu

SEQ ID NO: 30597 - RNA, 20 nt, Artificial Sequence
  HTT spacer sequence TTCN PAM
ggagaaguaacaguacuguc

SEQ ID NO: 30598 - RNA, 20 nt, Artificial Sequence
  HTT spacer sequence TTCN PAM
ccugaaguaacaacuacguu

SEQ ID NO: 30599 - RNA, 20 nt, Artificial Sequence
  HTT spacer sequence TTCN PAM
agagaccaugaagaauauuu

SEQ ID NO: 30600 - RNA, 20 nt, Artificial Sequence
  HTT spacer sequence TTCN PAM
uggucucuggaacuguacca

SEQ ID NO: 30601 - RNA, 20 nt, Artificial Sequence
  HTT spacer sequence TTCN PAM
ucauggucucuggaacugua

SEQ ID NO: 30602 - RNA, 20 nt, Artificial Sequence
  HTT spacer sequence TTCN PAM
guaagaaauccacccucugu

SEQ ID NO: 30603 - RNA, 20 nt, Artificial Sequence
  HTT spacer sequence TTCN PAM
uacagaaauaucuaucaugg

SEQ ID NO: 30604 - RNA, 20 nt, Artificial Sequence
  HTT spacer sequence TTCN PAM
aacagaggguggauuucuua

SEQ ID NO: 30605 - RNA, 20 nt, Artificial Sequence
  HTT spacer sequence TTCN PAM
aggacauauucaaacagagg

SEQ ID NO: 30606 - RNA, 20 nt, Artificial Sequence
  HTT spacer sequence TTCN PAM
uguucuaggacauauucaaa

SEQ ID NO: 30607 - RNA, 20 nt, Artificial Sequence
  HTT spacer sequence TTCN PAM
uacuuggacucuugcuaauc

SEQ ID NO: 30608 - RNA, 20 nt, Artificial Sequence
  HTT spacer sequence TTCN PAM
caaaaucugagucauuacau

SEQ ID NO: 30609 - RNA, 20 nt, Artificial Sequence
  HTT spacer sequence TTCN PAM
uucacaaaaucugagucauu

SEQ ID NO: 30610 - RNA, 20 nt, Artificial Sequence
  HTT spacer sequence TTCN PAM
ucuguucuuucacaaaaucu

SEQ ID NO: 30611 - RNA, 20 nt, Artificial Sequence
  HTT spacer sequence TTCN PAM
ggaacaugggucauguguuu

SEQ ID NO: 30612 - RNA, 20 nt, Artificial Sequence
  HTT spacer sequence TTCN PAM
agaaauuuuuccucuguucu

SEQ ID NO: 30613 - RNA, 20 nt, Artificial Sequence
  HTT spacer sequence TTCN PAM
uuuguaaacacaugacccau

SEQ ID NO: 30614 - RNA, 20 nt, Artificial Sequence
  HTT spacer sequence TTCN PAM
uuccuuuguaaacacaugac

SEQ ID NO: 30615 - RNA, 20 nt, Artificial Sequence
  HTT spacer sequence TTCN PAM
caauagcuaaaauuugcuaa

SEQ ID NO: 30616 - RNA, 20 nt, Artificial Sequence
  HTT spacer sequence TTCN PAM
ggaggccaagguaggcagau

SEQ ID NO: 30617 - RNA, 20 nt, Artificial Sequence
  HTT spacer sequence TTCN PAM
gggcucaagcgaucugccua

SEQ ID NO: 30618 - RNA, 20 nt, Artificial Sequence
  HTT spacer sequence TTCN PAM
agaucagccuaggcaacaug

SEQ ID NO: 30619 - RNA, 20 nt, Artificial Sequence
  HTT spacer sequence TTCN PAM
uuuuuaauguauuuauuuau

SEQ ID NO: 30620 - RNA, 20 nt, Artificial Sequence
  HTT spacer sequence TTCN PAM
uaucuucuuuuuuaauguau

SEQ ID NO: 30621 - RNA, 20 nt, Artificial Sequence
  HTT spacer sequence TTCN PAM
caaacaaaugauuggcugca

SEQ ID NO: 30622 - RNA, 20 nt, Artificial Sequence
  HTT spacer sequence TTCN PAM
ugcagccaaucauuuguuug

SEQ ID NO: 30623 - RNA, 20 nt, Artificial Sequence
  HTT spacer sequence TTCN PAM
cacagacuugcucuggaggu

SEQ ID NO: 30624 - RNA, 20 nt, Artificial Sequence
  HTT spacer sequence TTCN PAM
gaguaggggugagcugacug

SEQ ID NO: 30625 - RNA, 20 nt, Artificial Sequence
  HTT spacer sequence TTCN PAM
gacaggcauucagaguaggg

SEQ ID NO: 30626 - RNA, 20 nt, Artificial Sequence
  HTT spacer sequence TTCN PAM
aaucgugcauuugcuuuuuc

SEQ ID NO: 30627 - RNA, 20 nt, Artificial Sequence
  HTT spacer sequence TTCN PAM
aagugcuagcacuuccucca

SEQ ID NO: 30628 - RNA, 20 nt, Artificial Sequence
  HTT spacer sequence TTCN PAM
uccagugggcuugagagagc

SEQ ID NO: 30629 - RNA, 20 nt, Artificial Sequence
  HTT spacer sequence TTCN PAM
uucgcuuaugcuugaagucc

SEQ ID NO: 30630 - RNA, 20 nt, Artificial Sequence
  HTT spacer sequence TTCN PAM
cuuaugcuugaaguccuccg

SEQ ID NO: 30631 - RNA, 20 nt, Artificial Sequence
  HTT spacer sequence TTCN PAM
agcauaagcgaaagaauuac

SEQ ID NO: 30632 - RNA, 20 nt, Artificial Sequence
  HTT spacer sequence TTCN PAM
gaggacuucaagcauaagcg

SEQ ID NO: 30633 - RNA, 20 nt, Artificial Sequence
  HTT spacer sequence TTCN PAM
uuucggaggacuucaagcau

SEQ ID NO: 30634 - RNA, 20 nt, Artificial Sequence
  HTT spacer sequence TTCN PAM
uuuaccauugugcucacuca

SEQ ID NO: 30635 - RNA, 20 nt, Artificial Sequence
  HTT spacer sequence TTCN PAM
acuacagucuguggccuaaa

SEQ ID NO: 30636 - RNA, 20 nt, Artificial Sequence
  HTT spacer sequence TTCN PAM
gacgugggcagacccgaggu

SEQ ID NO: 30637 - RNA, 20 nt, Artificial Sequence
  HTT spacer sequence TTCN PAM
agcagcgugaucuugggccc

SEQ ID NO: 30638 - RNA, 20 nt, Artificial Sequence
  HTT spacer sequence TTCN PAM
cugcuagagaugagaucacg

SEQ ID NO: 30639 - RNA, 20 nt, Artificial Sequence
  HTT spacer sequence TTCN PAM
cacccagcucucagcacagu

SEQ ID NO: 30640 - RNA, 20 nt, Artificial Sequence
  HTT spacer sequence TTCN PAM
auucccuuucucugauuugc

SEQ ID NO: 30641 - RNA, 20 nt, Artificial Sequence
  HTT spacer sequence TTCN PAM
cuuucucugauuugcccauu

SEQ ID NO: 30642 - RNA, 20 nt, Artificial Sequence
  HTT spacer sequence TTCN PAM
cugauuugcccauuccacuu

SEQ ID NO: 30643 - RNA, 20 nt, Artificial Sequence
  HTT spacer sequence TTCN PAM
aagauaaugacuguuaauau

SEQ ID NO: 30644 - RNA, 20 nt, Artificial Sequence
  HTT spacer sequence TTCN PAM
aauauuuuccacaauuaacu

SEQ ID NO: 30645 - RNA, 20 nt, Artificial Sequence
  HTT spacer sequence TTCN PAM
acaauuaacuuuguauuucu

SEQ ID NO: 30646 - RNA, 20 nt, Artificial Sequence
  HTT spacer sequence TTCN PAM
uuuguguggccuaagaaaug

SEQ ID NO: 30647 - RNA, 20 nt, Artificial Sequence
  HTT spacer sequence TTCN PAM
uaggccacacaaaggaagcu

SEQ ID NO: 30648 - RNA, 20 nt, Artificial Sequence
  HTT spacer sequence TTCN PAM
uguggcucgcacuugacagg

SEQ ID NO: 30649 - RNA, 20 nt, Artificial Sequence
  HTT spacer sequence TTCN PAM
uuuuuuuuguagcuuuuugc

SEQ ID NO: 30650 - RNA, 20 nt, Artificial Sequence
  HTT spacer sequence TTCN PAM
uuauucuuuuuuuuuguagc

SEQ ID NO: 30651 - RNA, 20 nt, Artificial Sequence
  HTT spacer sequence TTCN PAM
ucuucuuuauucuuuuuuuu

SEQ ID NO: 30652 - RNA, 20 nt, Artificial Sequence
  HTT spacer sequence TTCN PAM
ccuuuccucuucuuuauucu

SEQ ID NO: 30653 - RNA, 20 nt, Artificial Sequence
  HTT spacer sequence TTCN PAM
cauuuagagccauagcuuca

SEQ ID NO: 30654 - RNA, 20 nt, Artificial Sequence
  HTT spacer sequence TTCN PAM
uuucucauuuagagccauag

SEQ ID NO: 30655 - RNA, 20 nt, Artificial Sequence
  HTT spacer sequence TTCN PAM
ggagaaagugcaaaguagau

SEQ ID NO: 30656 - RNA, 20 nt, Artificial Sequence
  HTT spacer sequence TTCN PAM
ccagaauucuuuucucauuu

SEQ ID NO: 30657 - RNA, 20 nt, Artificial Sequence
  HTT spacer sequence TTCN PAM
uaguaagugucuccucuuag

SEQ ID NO: 30658 - RNA, 20 nt, Artificial Sequence
  HTT spacer sequence TTCN PAM
cugugcauuguuugauucau

SEQ ID NO: 30659 - RNA, 20 nt, Artificial Sequence
  HTT spacer sequence TTCN PAM
uagcacuuuugucagccgac

SEQ ID NO: 30660 - RNA, 20 nt, Artificial Sequence
  HTT spacer sequence TTCN PAM
gugagcgugagcugagcggc

SEQ ID NO: 30661 - RNA, 20 nt, Artificial Sequence
  HTT spacer sequence TTCN PAM
acggcuucagugagcgugag

SEQ ID NO: 30662 - RNA, 20 nt, Artificial Sequence
  HTT spacer sequence TTCN PAM
uguuuucugaguuuaugugg

SEQ ID NO: 30663 - RNA, 20 nt, Artificial Sequence
  HTT spacer sequence TTCN PAM
gaguuuauguggggguuugc

SEQ ID NO: 30664 - RNA, 20 nt, Artificial Sequence
  HTT spacer sequence TTCN PAM
uucuuauucaaaccuuagaa

SEQ ID NO: 30665 - RNA, 20 nt, Artificial Sequence
  HTT spacer sequence TTCN PAM
uauucaaaccuuagaaaaca

SEQ ID NO: 30666 - RNA, 20 nt, Artificial Sequence
  HTT spacer sequence TTCN PAM
aaccuuagaaaacauagaag

SEQ ID NO: 30667 - RNA, 20 nt, Artificial Sequence
  HTT spacer sequence TTCN PAM
aagguuugaauaagaaagaa

SEQ ID NO: 30668 - RNA, 20 nt, Artificial Sequence
  HTT spacer sequence TTCN PAM
auguuuucuaagguuugaau

SEQ ID NO: 30669 - RNA, 20 nt, Artificial Sequence
  HTT spacer sequence TTCN PAM
aacuucugguuuguuauaaa

SEQ ID NO: 30670 - RNA, 20 nt, Artificial Sequence
  HTT spacer sequence TTCN PAM
gguuuguuauaaaucuguag

SEQ ID NO: 30671 - RNA, 20 nt, Artificial Sequence
  HTT spacer sequence TTCN PAM
gucacucuucacaccugcca

SEQ ID NO: 30672 - RNA, 20 nt, Artificial Sequence
  HTT spacer sequence TTCN PAM
caccugccagcuugcagagg

SEQ ID NO: 30673 - RNA, 20 nt, Artificial Sequence
  HTT spacer sequence TTCN PAM
uggugaauugcccuuuccuu

SEQ ID NO: 30674 - RNA, 20 nt, Artificial Sequence
  HTT spacer sequence TTCN PAM
ccaagaaacacggguaacua

SEQ ID NO: 30675 - RNA, 20 nt, Artificial Sequence
  HTT spacer sequence TTCN PAM
uuucccuuaucacagccagc

SEQ ID NO: 30676 - RNA, 20 nt, Artificial Sequence
  HTT spacer sequence TTCN PAM
cuuaucacagccagccagag

SEQ ID NO: 30677 - RNA, 20 nt, Artificial Sequence
  HTT spacer sequence TTCN PAM
cuggccccugggacacugug

SEQ ID NO: 30678 - RNA, 20 nt, Artificial Sequence
  HTT spacer sequence TTCN PAM
cucucucucucucuuuuuuu

SEQ ID NO: 30679 - RNA, 20 nt, Artificial Sequence
  HTT spacer sequence TTCN PAM
cucuguuguccaggcuggag

SEQ ID NO: 30680 - RNA, 20 nt, Artificial Sequence
  HTT spacer sequence TTCN PAM
aggcccaagugauccuccua

SEQ ID NO: 30681 - RNA, 20 nt, Artificial Sequence
  HTT spacer sequence TTCN PAM
uccaagccauuuauuucuua

SEQ ID NO: 30682 - RNA, 20 nt, Artificial Sequence
  HTT spacer sequence TTCN PAM
uagcccggagguuagcugcu

SEQ ID NO: 30683 - RNA, 20 nt, Artificial Sequence
  HTT spacer sequence TTCN PAM
gaguagcugggacuacaguc

SEQ ID NO: 30684 - RNA, 20 nt, Artificial Sequence
  HTT spacer sequence TTCN PAM
agcaauccucccaccacagc

SEQ ID NO: 30685 - RNA, 20 nt, Artificial Sequence
  HTT spacer sequence TTCN PAM
uuugcuuaaaugcuuugauu

SEQ ID NO: 30686 - RNA, 20 nt, Artificial Sequence
  HTT spacer sequence TTCN PAM
auaucguuggccucucccaa

SEQ ID NO: 30687 - RNA, 20 nt, Artificial Sequence
  HTT spacer sequence TTCN PAM
uugggagaggccaacgauau

SEQ ID NO: 30688 - RNA, 20 nt, Artificial Sequence
  HTT spacer sequence TTCN PAM
acaucugcuuaauauauauu

SEQ ID NO: 30689 - RNA, 20 nt, Artificial Sequence
  HTT spacer sequence TTCN PAM
uucaacaucugcuuaauaua

SEQ ID NO: 30690 - RNA, 20 nt, Artificial Sequence
  HTT spacer sequence TTCN PAM
caagaggagagaaaguaagg

SEQ ID NO: 30691 - RNA, 20 nt, Artificial Sequence
  HTT spacer sequence TTCN PAM
cuccucuugugaauauucau

SEQ ID NO: 30692 - RNA, 20 nt, Artificial Sequence
  HTT spacer sequence TTCN PAM
agggccagugagaauuccuu

SEQ ID NO: 30693 - RNA, 20 nt, Artificial Sequence
  HTT spacer sequence TTCN PAM
cacuggcccuugaauuagua

SEQ ID NO: 30694 - RNA, 20 nt, Artificial Sequence
  HTT spacer sequence TTCN PAM
uugugguuuaauucuguggu

SEQ ID NO: 30695 - RNA, 20 nt, Artificial Sequence
  HTT spacer sequence TTCN PAM
cagcaccucuguuacuguuu

SEQ ID NO: 30696 - RNA, 20 nt, Artificial Sequence
  HTT spacer sequence TTCN PAM
aggaaugaaaaucaaauaau

SEQ ID NO: 30697 - RNA, 20 nt, Artificial Sequence
  HTT spacer sequence TTCN PAM
uggaauaaauccaacuuggu

SEQ ID NO: 30698 - RNA, 20 nt, Artificial Sequence
  HTT spacer sequence TTCN PAM
uuccuggaauaaauccaacu

SEQ ID NO: 30699 - RNA, 20 nt, Artificial Sequence
  HTT spacer sequence TTCN PAM
cauuuaaucacuugguuaaa

SEQ ID NO: 30700 - RNA, 20 nt, Artificial Sequence
  HTT spacer sequence TTCN PAM
aauuguuaguggcugauuca

SEQ ID NO: 30701 - RNA, 20 nt, Artificial Sequence
  HTT spacer sequence TTCN PAM
auuuucuaauuguuaguggc

SEQ ID NO: 30702 - RNA, 20 nt, Artificial Sequence
  HTT spacer sequence TTCN PAM
ugaugccauuguaaauggua

SEQ ID NO: 30703 - RNA, 20 nt, Artificial Sequence
  HTT spacer sequence TTCN PAM
ccugccucagccucccgagu

SEQ ID NO: 30704 - RNA, 20 nt, Artificial Sequence
  HTT spacer sequence TTCN PAM
agcgauucuccugccucagc

SEQ ID NO: 30705 - RNA, 20 nt, Artificial Sequence
  HTT spacer sequence TTCN PAM
uguucuguuuuuaugauguu

SEQ ID NO: 30706 - RNA, 20 nt, Artificial Sequence
  HTT spacer sequence TTCN PAM
guuuuuaugauguugcuguc

SEQ ID NO: 30707 - RNA, 20 nt, Artificial Sequence
  HTT spacer sequence TTCN PAM
uaagcguaggcuaaacuaac

SEQ ID NO: 30708 - RNA, 20 nt, Artificial Sequence
  HTT spacer sequence TTCN PAM
uaauggugagcaccaagcac

SEQ ID NO: 30709 - RNA, 20 nt, Artificial Sequence
  HTT spacer sequence TTCN PAM
aauccccuccauucauaaug

SEQ ID NO: 30710 - RNA, 20 nt, Artificial Sequence
  HTT spacer sequence TTCN PAM
cauuuacaaccugggcaauc

SEQ ID NO: 30711 - RNA, 20 nt, Artificial Sequence
  HTT spacer sequence TTCN PAM
augcugcagagcuguguugc

SEQ ID NO: 30712 - RNA, 20 nt, Artificial Sequence
  HTT spacer sequence TTCN PAM
aagccgcaacacagcucugc

SEQ ID NO: 30713 - RNA, 20 nt, Artificial Sequence
  HTT spacer sequence TTCN PAM
cucuguaaaucuuccaagcc

SEQ ID NO: 30714 - RNA, 20 nt, Artificial Sequence
  HTT spacer sequence TTCN PAM
uucccucuguaaaucuucca

SEQ ID NO: 30715 - RNA, 20 nt, Artificial Sequence
  HTT spacer sequence TTCN PAM
uaccuguauacaauucuuuc

SEQ ID NO: 30716 - RNA, 20 nt, Artificial Sequence
  HTT spacer sequence TTCN PAM
cccagcccuaggcuucccug

SEQ ID NO: 30717 - RNA, 20 nt, Artificial Sequence
  HTT spacer sequence TTCN PAM
cugguucacacuggcugcuu

SEQ ID NO: 30718 - RNA, 20 nt, Artificial Sequence
  HTT spacer sequence TTCN PAM
cacuggcugcuuccaggaug

SEQ ID NO: 30719 - RNA, 20 nt, Artificial Sequence
  HTT spacer sequence TTCN PAM
aggaugggcaggagaauagc

SEQ ID NO: 30720 - RNA, 20 nt, Artificial Sequence
  HTT spacer sequence TTCN PAM
ccugcccauccuggaagcag

SEQ ID NO: 30721 - RNA, 20 nt, Artificial Sequence
  HTT spacer sequence TTCN PAM
uaggguuggucacuuacacu

SEQ ID NO: 30722 - RNA, 20 nt, Artificial Sequence
  HTT spacer sequence TTCN PAM
aauaguguaagugaccaacc

SEQ ID NO: 30723 - RNA, 20 nt, Artificial Sequence
  HTT spacer sequence TTCN PAM
auauaaccuacacacauccu

SEQ ID NO: 30724 - RNA, 20 nt, Artificial Sequence
  HTT spacer sequence TTCN PAM
cuuggauaucaaaauccaag

SEQ ID NO: 30725 - RNA, 20 nt, Artificial Sequence
  HTT spacer sequence TTCN PAM
uuguaccuuugcacaaggug

SEQ ID NO: 30726 - RNA, 20 nt, Artificial Sequence
  HTT spacer sequence TTCN PAM
ugugugggugccacucucca

SEQ ID NO: 30727 - RNA, 20 nt, Artificial Sequence
  HTT spacer sequence TTCN PAM
ugucauucugagagacuccu

SEQ ID NO: 30728 - RNA, 20 nt, Artificial Sequence
  HTT spacer sequence TTCN PAM
gagagacuccugcucauccg

SEQ ID NO: 30729 - RNA, 20 nt, Artificial Sequence
  HTT spacer sequence TTCN PAM
ugggaguccuugaucucauu

SEQ ID NO: 30730 - RNA, 20 nt, Artificial Sequence
  HTT spacer sequence TTCN PAM
uccuauucugauggaccuuu

SEQ ID NO: 30731 - RNA, 20 nt, Artificial Sequence
  HTT spacer sequence TTCN PAM
uauucugauggaccuuuggc

SEQ ID NO: 30732 - RNA, 20 nt, Artificial Sequence
  HTT spacer sequence TTCN PAM
gauggaccuuuggcuucucc

SEQ ID NO: 30733 - RNA, 20 nt, Artificial Sequence
  HTT spacer sequence TTCN PAM
ccuuaucuuauauaucccac

SEQ ID NO: 30734 - RNA, 20 nt, Artificial Sequence
  HTT spacer sequence TTCN PAM
ucaacucaggcgaccaccuc

SEQ ID NO: 30735 - RNA, 20 nt, Artificial Sequence
  HTT spacer sequence TTCN PAM
augguccaauaccaccagac

SEQ ID NO: 30736 - RNA, 20 nt, Artificial Sequence
  HTT spacer sequence TTCN PAM
uuuguuacuccuggaguaaa

SEQ ID NO: 30737 - RNA, 20 nt, Artificial Sequence
  HTT spacer sequence TTCN PAM
caggugacuacggcugagcc

SEQ ID NO: 30738 - RNA, 20 nt, Artificial Sequence
  HTT spacer sequence TTCN PAM
gucucaagaugagcuggauu

SEQ ID NO: 30739 - RNA, 20 nt, Artificial Sequence
  HTT spacer sequence TTCN PAM
caugugagcuuuggcucauc

SEQ ID NO: 30740 - RNA, 20 nt, Artificial Sequence
  HTT spacer sequence TTCN PAM
acaaaugcuuagugauaccu

SEQ ID NO: 30741 - RNA, 20 nt, Artificial Sequence
  HTT spacer sequence TTCN PAM
uucaacaaaugcuuagugau

SEQ ID NO: 30742 - RNA, 20 nt, Artificial Sequence
  HTT spacer sequence TTCN PAM
caccucagcccccugaguag

SEQ ID NO: 30743 - RNA, 20 nt, Artificial Sequence
  HTT spacer sequence TTCN PAM
aauauggggaauuuucaguu

SEQ ID NO: 30744 - RNA, 20 nt, Artificial Sequence
  HTT spacer sequence TTCN PAM
ccauauuagaaugccucaag

SEQ ID NO: 30745 - RNA, 20 nt, Artificial Sequence
  HTT spacer sequence TTCN PAM
guuuuugaaacacuuaaaaa

SEQ ID NO: 30746 - RNA, 20 nt, Artificial Sequence
  HTT spacer sequence TTCN PAM
aaaacugaaaauuccccaua

SEQ ID NO: 30747 - RNA, 20 nt, Artificial Sequence
  HTT spacer sequence TTCN PAM
cuuaccauuaacauauuuuu

SEQ ID NO: 30748 - RNA, 20 nt, Artificial Sequence
  HTT spacer sequence TTCN PAM
uuaaggacuguuugcuuucc

SEQ ID NO: 30749 - RNA, 20 nt, Artificial Sequence
  HTT spacer sequence TTCN PAM
uuccuacugggcugcauauu

SEQ ID NO: 30750 - RNA, 20 nt, Artificial Sequence
  HTT spacer sequence TTCN PAM
uacugggcugcauauuuaau

SEQ ID NO: 30751 - RNA, 20 nt, Artificial Sequence
  HTT spacer sequence TTCN PAM
gugauuaaauaugcagccca

SEQ ID NO: 30752 - RNA, 20 nt, Artificial Sequence
  HTT spacer sequence TTCN PAM
aaucuguauaacuaugcaaa

SEQ ID NO: 30753 - RNA, 20 nt, Artificial Sequence
  HTT spacer sequence TTCN PAM
uugcauaguuauacagauuu

SEQ ID NO: 30754 - RNA, 20 nt, Artificial Sequence
  HTT spacer sequence TTCN PAM
uuuuacacugucgucacaug

SEQ ID NO: 30755 - RNA, 20 nt, Artificial Sequence
  HTT spacer sequence TTCN PAM
ucucagcaaacaacucacau

SEQ ID NO: 30756 - RNA, 20 nt, Artificial Sequence
  HTT spacer sequence TTCN PAM
uguccugccuguuugccgug

SEQ ID NO: 30757 - RNA, 20 nt, Artificial Sequence
  HTT spacer sequence TTCN PAM
ugagccacggcaaacaggca

SEQ ID NO: 30758 - RNA, 20 nt, Artificial Sequence
  HTT spacer sequence TTCN PAM
uguuuugccgcgcuagcccu

SEQ ID NO: 30759 - RNA, 20 nt, Artificial Sequence
  HTT spacer sequence TTCN PAM
uacuggguacucaggaauca

SEQ ID NO: 30760 - RNA, 20 nt, Artificial Sequence
  HTT spacer sequence TTCN PAM
ugaguacccaguaggaacaa

SEQ ID NO: 30761 - RNA, 20 nt, Artificial Sequence
  HTT spacer sequence TTCN PAM
gaauaauugggccuuuuguu

SEQ ID NO: 30762 - RNA, 20 nt, Artificial Sequence
  HTT spacer sequence TTCN PAM
gaaguuggcacugugauucc

SEQ ID NO: 30763 - RNA, 20 nt, Artificial Sequence
  HTT spacer sequence TTCN PAM
uguagagacuugaagccuga

SEQ ID NO: 30764 - RNA, 20 nt, Artificial Sequence
  HTT spacer sequence TTCN PAM
agucucuacaagaaacaaca

SEQ ID NO: 30765 - RNA, 20 nt, Artificial Sequence
  HTT spacer sequence TTCN PAM
caggcuucaagucucuacaa

SEQ ID NO: 30766 - RNA, 20 nt, Artificial Sequence
  HTT spacer sequence TTCN PAM
ccuugaugaucgugguaagu

SEQ ID NO: 30767 - RNA, 20 nt, Artificial Sequence
  HTT spacer sequence TTCN PAM
caucuaauggguagacuuug

SEQ ID NO: 30768 - RNA, 20 nt, Artificial Sequence
  HTT spacer sequence TTCN PAM
guauccaagucccucuaaca

SEQ ID NO: 30769 - RNA, 20 nt, Artificial Sequence
  HTT spacer sequence TTCN PAM
gcauccaacuuucuguaucc

SEQ ID NO: 30770 - RNA, 20 nt, Artificial Sequence
  HTT spacer sequence TTCN PAM
cuccuaaucauuaaguccac

SEQ ID NO: 30771 - RNA, 20 nt, Artificial Sequence
  HTT spacer sequence TTCN PAM
auucucuccuaaucauuaag

SEQ ID NO: 30772 - RNA, 20 nt, Artificial Sequence
  HTT spacer sequence TTCN PAM
uuuuguuauuguuuccauuc

SEQ ID NO: 30773 - RNA, 20 nt, Artificial Sequence
  HTT spacer sequence TTCN PAM
uuuuaaaaagaugaaauacu

SEQ ID NO: 30774 - RNA, 20 nt, Artificial Sequence
  HTT spacer sequence TTCN PAM
ucuuuuuaaaaugaacacau

SEQ ID NO: 30775 - RNA, 20 nt, Artificial Sequence
  HTT spacer sequence TTCN PAM
ccuguguuuaggcaagaagc

SEQ ID NO: 30776 - RNA, 20 nt, Artificial Sequence
  HTT spacer sequence TTCN PAM
ugccuaaacacaggggaaug

SEQ ID NO: 30777 - RNA, 20 nt, Artificial Sequence
  HTT spacer sequence TTCN PAM
auuaaugauugaguuuuaga

SEQ ID NO: 30778 - RNA, 20 nt, Artificial Sequence
  HTT spacer sequence TTCN PAM
aaaacucaaucauuaauuga

SEQ ID NO: 30779 - RNA, 20 nt, Artificial Sequence
  HTT spacer sequence TTCN PAM
aggcugcagugagcuaugau

SEQ ID NO: 30780 - RNA, 20 nt, Artificial Sequence
  HTT spacer sequence TTCN PAM
gcauagcugggacuacagcu

SEQ ID NO: 30781 - RNA, 20 nt, Artificial Sequence
  HTT spacer sequence TTCN PAM
caaacuacugcccucaagca

SEQ ID NO: 30782 - RNA, 20 nt, Artificial Sequence
  HTT spacer sequence TTCN PAM
cucccaaagcacuaggguua

SEQ ID NO: 30783 - RNA, 20 nt, Artificial Sequence
  HTT spacer sequence TTCN PAM
agguggggcacaguggcuua

SEQ ID NO: 30784 - RNA, 20 nt, Artificial Sequence
  HTT spacer sequence TTCN PAM
gacuuuguguuuacuuuaau

SEQ ID NO: 30785 - RNA, 20 nt, Artificial Sequence
  HTT spacer sequence TTCN PAM
cccucuuguuucuugcuguu

SEQ ID NO: 30786 - RNA, 20 nt, Artificial Sequence
  HTT spacer sequence TTCN PAM
ugcuguugacccaccucuug

SEQ ID NO: 30787 - RNA, 20 nt, Artificial Sequence
  HTT spacer sequence TTCN PAM
uuuuuauuuccauuccccuc

SEQ ID NO: 30788 - RNA, 20 nt, Artificial Sequence
  HTT spacer sequence TTCN PAM
auuccccucuaaacuuuguc

SEQ ID NO: 30789 - RNA, 20 nt, Artificial Sequence
  HTT spacer sequence TTCN PAM
ccucuaaacuuugucauguu

SEQ ID NO: 30790 - RNA, 20 nt, Artificial Sequence
  HTT spacer sequence TTCN PAM
gcaggcuccuugucugcagc

SEQ ID NO: 30791 - RNA, 20 nt, Artificial Sequence
  HTT spacer sequence TTCN PAM
ucuaagggagagucauaccc

SEQ ID NO: 30792 - RNA, 20 nt, Artificial Sequence
  HTT spacer sequence TTCN PAM
ggguaugacucucccuuaga

SEQ ID NO: 30793 - RNA, 20 nt, Artificial Sequence
  HTT spacer sequence TTCN PAM
uucaagugaguuuucuuggc

SEQ ID NO: 30794 - RNA, 20 nt, Artificial Sequence
  HTT spacer sequence TTCN PAM
agugaguuuucuuggcaaag

SEQ ID NO: 30795 - RNA, 20 nt, Artificial Sequence
  HTT spacer sequence TTCN PAM
uggcaaagaagggucuuaca

SEQ ID NO: 30796 - RNA, 20 nt, Artificial Sequence
  HTT spacer sequence TTCN PAM
uugccaagaaaacucacuug

SEQ ID NO: 30797 - RNA, 20 nt, Artificial Sequence
  HTT spacer sequence TTCN PAM
cggcaggagccacugaccuu

SEQ ID NO: 30798 - RNA, 20 nt, Artificial Sequence
  HTT spacer sequence TTCN PAM
aagucccccacgacugcccu

SEQ ID NO: 30799 - RNA, 20 nt, Artificial Sequence
  HTT spacer sequence TTCN PAM
ugcuuaucuaauucauguau

SEQ ID NO: 30800 - RNA, 20 nt, Artificial Sequence
  HTT spacer sequence TTCN PAM
uguaugacacccugcccugu

SEQ ID NO: 30801 - RNA, 20 nt, Artificial Sequence
  HTT spacer sequence TTCN PAM
ucacagggcagggugucaua

SEQ ID NO: 30802 - RNA, 20 nt, Artificial Sequence
  HTT spacer sequence TTCN PAM
aguacccuccuuccucacag

SEQ ID NO: 30803 - RNA, 20 nt, Artificial Sequence
  HTT spacer sequence TTCN PAM
cauuuaauggaaggcgauac

SEQ ID NO: 30804 - RNA, 20 nt, Artificial Sequence
  HTT spacer sequence TTCN PAM
auuaaaugagaauuccagua

SEQ ID NO: 30805 - RNA, 20 nt, Artificial Sequence
  HTT spacer sequence TTCN PAM
uaaaucuugguaucgccuuc

SEQ ID NO: 30806 - RNA, 20 nt, Artificial Sequence
  HTT spacer sequence TTCN PAM
uuccuggugcugugcugcuc

SEQ ID NO: 30807 - RNA, 20 nt, Artificial Sequence
  HTT spacer sequence TTCN PAM
uggugcugugcugcucacca

SEQ ID NO: 30808 - RNA, 20 nt, Artificial Sequence
  HTT spacer sequence TTCN PAM
cuuagugcccuccccaccca

SEQ ID NO: 30809 - RNA, 20 nt, Artificial Sequence
  HTT spacer sequence TTCN PAM
accuacccuuguuaagccuu

SEQ ID NO: 30810 - RNA, 20 nt, Artificial Sequence
  HTT spacer sequence TTCN PAM
gaucaaccacauagcuugga

SEQ ID NO: 30811 - RNA, 20 nt, Artificial Sequence
  HTT spacer sequence TTCN PAM
cugcuuuguuuacacaaaag

SEQ ID NO: 30812 - RNA, 20 nt, Artificial Sequence
  HTT spacer sequence TTCN PAM
uuauguuuaugagcaagcac

SEQ ID NO: 30813 - RNA, 20 nt, Artificial Sequence
  HTT spacer sequence TTCN PAM
caugauugucccuuuauguu

SEQ ID NO: 30814 - RNA, 20 nt, Artificial Sequence
  HTT spacer sequence TTCN PAM
aaccauuucucaugauuguc

SEQ ID NO: 30815 - RNA, 20 nt, Artificial Sequence
  HTT spacer sequence TTCN PAM
guguuuuuaggagauuuuuc

SEQ ID NO: 30816 - RNA, 20 nt, Artificial Sequence
  HTT spacer sequence TTCN PAM
guguaguucucucuucuuua

SEQ ID NO: 30817 - RNA, 20 nt, Artificial Sequence
  HTT spacer sequence TTCN PAM
cucuucuuuagaacuuuacc

SEQ ID NO: 30818 - RNA, 20 nt, Artificial Sequence
  HTT spacer sequence TTCN PAM
uuagaacuuuaccccacaug

SEQ ID NO: 30819 - RNA, 20 nt, Artificial Sequence
  HTT spacer sequence TTCN PAM
aaagaagagagaacuacaca

SEQ ID NO: 30820 - RNA, 20 nt, Artificial Sequence
  HTT spacer sequence TTCN PAM
ccagugcuaacuccugccug

SEQ ID NO: 30821 - RNA, 20 nt, Artificial Sequence
  HTT spacer sequence TTCN PAM
ccuccugcgccacgaucuga

SEQ ID NO: 30822 - RNA, 20 nt, Artificial Sequence
  HTT spacer sequence TTCN PAM
gaucguggcgcaggagggga

SEQ ID NO: 30823 - RNA, 20 nt, Artificial Sequence
  HTT spacer sequence TTCN PAM
cugucucuucucuuggggac

SEQ ID NO: 30824 - RNA, 20 nt, Artificial Sequence
  HTT spacer sequence TTCN PAM
cuuggggaccacaguccucu

SEQ ID NO: 30825 - RNA, 20 nt, Artificial Sequence
  HTT spacer sequence TTCN PAM
uuuuuuuaaaguucuuuuua

SEQ ID NO: 30826 - RNA, 20 nt, Artificial Sequence
  HTT spacer sequence TTCN PAM
uuuuaaggucagggucucuc

SEQ ID NO: 30827 - RNA, 20 nt, Artificial Sequence
  HTT spacer sequence TTCN PAM
gguuguaauugugccacaau

SEQ ID NO: 30828 - RNA, 20 nt, Artificial Sequence
  HTT spacer sequence TTCN PAM
ggcaugcaccaccacaucca

SEQ ID NO: 30829 - RNA, 20 nt, Artificial Sequence
  HTT spacer sequence TTCN PAM
cagcuacucaggaggcugag

SEQ ID NO: 30830 - RNA, 20 nt, Artificial Sequence
  HTT spacer sequence TTCN PAM
agaccagccuggccaacaug

SEQ ID NO: 30831 - RNA, 20 nt, Artificial Sequence
  HTT spacer sequence TTCN PAM
ccauguuggccaggcugguc

SEQ ID NO: 30832 - RNA, 20 nt, Artificial Sequence
  HTT spacer sequence TTCN PAM
ccugccucggccuccugagu

SEQ ID NO: 30833 - RNA, 20 nt, Artificial Sequence
  HTT spacer sequence TTCN PAM
agcgauucuccugccucggc

SEQ ID NO: 30834 - RNA, 20 nt, Artificial Sequence
  HTT spacer sequence TTCN PAM
uugcaguucuuuuagucauu

SEQ ID NO: 30835 - RNA, 20 nt, Artificial Sequence
  HTT spacer sequence TTCN PAM
uuuagucauuagcaaaaguu

SEQ ID NO: 30836 - RNA, 20 nt, Artificial Sequence
  HTT spacer sequence TTCN PAM
uugguucuaggguuguucac

SEQ ID NO: 30837 - RNA, 20 nt, Artificial Sequence
  HTT spacer sequence TTCN PAM
aggguuguucacucaaauua

SEQ ID NO: 30838 - RNA, 20 nt, Artificial Sequence
  HTT spacer sequence TTCN PAM
cucaaauuaauuuaaaguca

SEQ ID NO: 30839 - RNA, 20 nt, Artificial Sequence
  HTT spacer sequence TTCN PAM
ggugauccaccugccuuggc

SEQ ID NO: 30840 - RNA, 20 nt, Artificial Sequence
  HTT spacer sequence TTCN PAM
agaccagccuggccaacaug

SEQ ID NO: 30841 - RNA, 20 nt, Artificial Sequence
  HTT spacer sequence TTCN PAM
ccauguuggccaggcugguc

SEQ ID NO: 30842 - RNA, 20 nt, Artificial Sequence
  HTT spacer sequence TTCN PAM
gccucagccccucaaguagc

SEQ ID NO: 30843 - RNA, 20 nt, Artificial Sequence
  HTT spacer sequence TTCN PAM
ucugccucagccccucaagu

SEQ ID NO: 30844 - RNA, 20 nt, Artificial Sequence
  HTT spacer sequence TTCN PAM
agcgauucuucugccucagc

SEQ ID NO: 30845 - RNA, 20 nt, Artificial Sequence
  HTT spacer sequence TTCN PAM
gcucacugcaaccuccgccu

SEQ ID NO: 30846 - RNA, 20 nt, Artificial Sequence
  HTT spacer sequence TTCN PAM
cuucugugcgguuaaaccac

SEQ ID NO: 30847 - RNA, 20 nt, Artificial Sequence
  HTT spacer sequence TTCN PAM
gugcgguuaaaccaccagcu

SEQ ID NO: 30848 - RNA, 20 nt, Artificial Sequence
  HTT spacer sequence TTCN PAM
uuuucuuaauuuugcuuuca

SEQ ID NO: 30849 - RNA, 20 nt, Artificial Sequence
  HTT spacer sequence TTCN PAM
uaauuuugcuuucaauuuuu

SEQ ID NO: 30850 - RNA, 20 nt, Artificial Sequence
  HTT spacer sequence TTCN PAM
auuuuuagcgaucuaauuuu

SEQ ID NO: 30851 - RNA, 20 nt, Artificial Sequence
  HTT spacer sequence TTCN PAM
ugccauucuccugccucagc

SEQ ID NO: 30852 - RNA, 20 nt, Artificial Sequence
  HTT spacer sequence TTCN PAM
ccugccucagccucccaagc

SEQ ID NO: 30853 - RNA, 20 nt, Artificial Sequence
  HTT spacer sequence TTCN PAM
ccguguuagccaggaugguc

SEQ ID NO: 30854 - RNA, 20 nt, Artificial Sequence
  HTT spacer sequence TTCN PAM
aaagauaacaccgcaaaaua

SEQ ID NO: 30855 - RNA, 20 nt, Artificial Sequence
  HTT spacer sequence TTCN PAM
aucccugaccauccccaagu

SEQ ID NO: 30856 - RNA, 20 nt, Artificial Sequence
  HTT spacer sequence TTCN PAM
uuccuucauuuacauacuau

SEQ ID NO: 30857 - RNA, 20 nt, Artificial Sequence
  HTT spacer sequence TTCN PAM
uucauuuacauacuauauau

SEQ ID NO: 30858 - RNA, 20 nt, Artificial Sequence
  HTT spacer sequence TTCN PAM
uuuacauacuauauauguau

SEQ ID NO: 30859 - RNA, 20 nt, Artificial Sequence
  HTT spacer sequence TTCN PAM
ccacucauuucuuaaauaaa

SEQ ID NO: 30860 - RNA, 20 nt, Artificial Sequence
  HTT spacer sequence TTCN PAM
uaaauaaaguaguagaccac

SEQ ID NO: 30861 - RNA, 20 nt, Artificial Sequence
  HTT spacer sequence TTCN PAM
cugaauauacgguggagaug

SEQ ID NO: 30862 - RNA, 20 nt, Artificial Sequence
  HTT spacer sequence TTCN PAM
gugaaauagccacguggagg

SEQ ID NO: 30863 - RNA, 20 nt, Artificial Sequence
  HTT spacer sequence TTCN PAM
guccgucugcugugccuccu

SEQ ID NO: 30864 - RNA, 20 nt, Artificial Sequence
  HTT spacer sequence TTCN PAM
ccugcaggaggcacagcaga

SEQ ID NO: 30865 - RNA, 20 nt, Artificial Sequence
  HTT spacer sequence TTCN PAM
guuggugccgcgauggagag

SEQ ID NO: 30866 - RNA, 20 nt, Artificial Sequence
  HTT spacer sequence TTCN PAM
uauuucguugaauguauccu

SEQ ID NO: 30867 - RNA, 20 nt, Artificial Sequence
  HTT spacer sequence TTCN PAM
uugaauguauccuugauaga

SEQ ID NO: 30868 - RNA, 20 nt, Artificial Sequence
  HTT spacer sequence TTCN PAM
acgaaauaggaaauuacaug

SEQ ID NO: 30869 - RNA, 20 nt, Artificial Sequence
  HTT spacer sequence TTCN PAM
aggacucuaucaaggauaca

SEQ ID NO: 30870 - RNA, 20 nt, Artificial Sequence
  HTT spacer sequence TTCN PAM
cccacuucuaggacucuauc

SEQ ID NO: 30871 - RNA, 20 nt, Artificial Sequence
  HTT spacer sequence TTCN PAM
uacgcaauuugucagauauu

SEQ ID NO: 30872 - RNA, 20 nt, Artificial Sequence
  HTT spacer sequence TTCN PAM
gcuccaggguguuucccguc

SEQ ID NO: 30873 - RNA, 20 nt, Artificial Sequence
  HTT spacer sequence TTCN PAM
cgucugcauucccaccagca

SEQ ID NO: 30874 - RNA, 20 nt, Artificial Sequence
  HTT spacer sequence TTCN PAM
caccagcagugcacgagagc

SEQ ID NO: 30875 - RNA, 20 nt, Artificial Sequence
  HTT spacer sequence TTCN PAM
ccacagccucgccagcagac

SEQ ID NO: 30876 - RNA, 20 nt, Artificial Sequence
  HTT spacer sequence TTCN PAM
cgaacuuuggaguuuuuguc

SEQ ID NO: 30877 - RNA, 20 nt, Artificial Sequence
  HTT spacer sequence TTCN PAM
agaacucggucugcuggcga

SEQ ID NO: 30878 - RNA, 20 nt, Artificial Sequence
  HTT spacer sequence TTCN PAM
cagcuaacaaacugacaaaa

SEQ ID NO: 30879 - RNA, 20 nt, Artificial Sequence
  HTT spacer sequence TTCN PAM
guguaguuuuaaguugcauu

SEQ ID NO: 30880 - RNA, 20 nt, Artificial Sequence
  HTT spacer sequence TTCN PAM
caguuuaaaaauccauuuuu

SEQ ID NO: 30881 - RNA, 20 nt, Artificial Sequence
  HTT spacer sequence TTCN PAM
uauaaaaauggauuuuuaaa

SEQ ID NO: 30882 - RNA, 20 nt, Artificial Sequence
  HTT spacer sequence TTCN PAM
uaucauugucuuauuuuucu

SEQ ID NO: 30883 - RNA, 20 nt, Artificial Sequence
  HTT spacer sequence TTCN PAM
uuuaaguagagugcuaacau

SEQ ID NO: 30884 - RNA, 20 nt, Artificial Sequence
  HTT spacer sequence TTCN PAM
uguauuuuucauuuaaguag

SEQ ID NO: 30885 - RNA, 20 nt, Artificial Sequence
  HTT spacer sequence TTCN PAM
agaccagccugggcaacaug

SEQ ID NO: 30886 - RNA, 20 nt, Artificial Sequence
  HTT spacer sequence TTCN PAM
uuuguagagacaggguuugg

SEQ ID NO: 30887 - RNA, 20 nt, Artificial Sequence
  HTT spacer sequence TTCN PAM
uuucuuuuguagagacaggg

SEQ ID NO: 30888 - RNA, 20 nt, Artificial Sequence
  HTT spacer sequence TTCN PAM
uuucuuuucuuuuguagaga

SEQ ID NO: 30889 - RNA, 20 nt, Artificial Sequence
  HTT spacer sequence TTCN PAM
uuuucuuuucuuuucuuuug

SEQ ID NO: 30890 - RNA, 20 nt, Artificial Sequence
  HTT spacer sequence TTCN PAM
auaauccacauuucauuuuc

SEQ ID NO: 30891 - RNA, 20 nt, Artificial Sequence
  HTT spacer sequence TTCN PAM
uucaauaauccacauuucau

SEQ ID NO: 30892 - RNA, 20 nt, Artificial Sequence
  HTT spacer sequence TTCN PAM
uccccuuguacagaugcauu

SEQ ID NO: 30893 - RNA, 20 nt, Artificial Sequence
  HTT spacer sequence TTCN PAM
ucucuaaagcaucaugcaga

SEQ ID NO: 30894 - RNA, 20 nt, Artificial Sequence
  HTT spacer sequence TTCN PAM
uucauuucaccaauaaauau

SEQ ID NO: 30895 - RNA, 20 nt, Artificial Sequence
  HTT spacer sequence TTCN PAM
uuucaccaauaaauauuuau

SEQ ID NO: 30896 - RNA, 20 nt, Artificial Sequence
  HTT spacer sequence TTCN PAM
ccaauaaauauuuauugagc

SEQ ID NO: 30897 - RNA, 20 nt, Artificial Sequence
  HTT spacer sequence TTCN PAM
aauaucauacccuggccuac

SEQ ID NO: 30898 - RNA, 20 nt, Artificial Sequence
  HTT spacer sequence TTCN PAM
ccacuuauccucagcuucua

SEQ ID NO: 30899 - RNA, 20 nt, Artificial Sequence
  HTT spacer sequence TTCN PAM
acuuauucaccacuuauccu

SEQ ID NO: 30900 - RNA, 20 nt, Artificial Sequence
  HTT spacer sequence TTCN PAM
agggcuggcuaaucuuucua

SEQ ID NO: 30901 - RNA, 20 nt, Artificial Sequence
  HTT spacer sequence TTCN PAM
acacacucaacagaauguuu

SEQ ID NO: 30902 - RNA, 20 nt, Artificial Sequence
  HTT spacer sequence TTCN PAM
guugaguguguagaaagauu

SEQ ID NO: 30903 - RNA, 20 nt, Artificial Sequence
  HTT spacer sequence TTCN PAM
auaauuucguauuuucuuua

SEQ ID NO: 30904 - RNA, 20 nt, Artificial Sequence
  HTT spacer sequence TTCN PAM
uauuuucuuuauaauuuuuu

SEQ ID NO: 30905 - RNA, 20 nt, Artificial Sequence
  HTT spacer sequence TTCN PAM
uuauaauuuuuuugagacag

SEQ ID NO: 30906 - RNA, 20 nt, Artificial Sequence
  HTT spacer sequence TTCN PAM
cacucuugcccugcaguggu

SEQ ID NO: 30907 - RNA, 20 nt, Artificial Sequence
  HTT spacer sequence TTCN PAM
ccgcagccucgaccuucugg

SEQ ID NO: 30908 - RNA, 20 nt, Artificial Sequence
  HTT spacer sequence TTCN PAM
gggcuuaagcgauccuccug

SEQ ID NO: 30909 - RNA, 20 nt, Artificial Sequence
  HTT spacer sequence TTCN PAM
caggcuggucucaaaaugug

SEQ ID NO: 30910 - RNA, 20 nt, Artificial Sequence
  HTT spacer sequence TTCN PAM
acauuuugagaccagccugg

SEQ ID NO: 30911 - RNA, 20 nt, Artificial Sequence
  HTT spacer sequence TTCN PAM
agcacuuugggaggccaagg

SEQ ID NO: 30912 - RNA, 20 nt, Artificial Sequence
  HTT spacer sequence TTCN PAM
caccuguaauuccagcacuu

SEQ ID NO: 30913 - RNA, 20 nt, Artificial Sequence
  HTT spacer sequence TTCN PAM
auaggaauucaacaaauauu

SEQ ID NO: 30914 - RNA, 20 nt, Artificial Sequence
  HTT spacer sequence TTCN PAM
uauggaacuaacaaauuagg

SEQ ID NO: 30915 - RNA, 20 nt, Artificial Sequence
  HTT spacer sequence TTCN PAM
acaaauauuuaaauccuucu

SEQ ID NO: 30916 - RNA, 20 nt, Artificial Sequence
  HTT spacer sequence TTCN PAM
auauucaacgcauuaacaca

SEQ ID NO: 30917 - RNA, 20 nt, Artificial Sequence
  HTT spacer sequence TTCN PAM
acgcauuaacacauaauaua

SEQ ID NO: 30918 - RNA, 20 nt, Artificial Sequence
  HTT spacer sequence TTCN PAM
cuaaguaccuuaauuuuguu

SEQ ID NO: 30919 - RNA, 20 nt, Artificial Sequence
  HTT spacer sequence TTCN PAM
cugacucuauuaccauuugu

SEQ ID NO: 30920 - RNA, 20 nt, Artificial Sequence
  HTT spacer sequence TTCN PAM
caagagaauaacuccauauc

SEQ ID NO: 30921 - RNA, 20 nt, Artificial Sequence
  HTT spacer sequence TTCN PAM
cuugagaacaaaugguaaua

SEQ ID NO: 30922 - RNA, 20 nt, Artificial Sequence
  HTT spacer sequence TTCN PAM
uguguagcugucccugugua

SEQ ID NO: 30923 - RNA, 20 nt, Artificial Sequence
  HTT spacer sequence TTCN PAM
gucagaguaccaguacuaua

SEQ ID NO: 30924 - RNA, 20 nt, Artificial Sequence
  HTT spacer sequence TTCN PAM
guaguugauauaauauucau

SEQ ID NO: 30925 - RNA, 20 nt, Artificial Sequence
  HTT spacer sequence TTCN PAM
uuauauuuuuauugauguac

SEQ ID NO: 30926 - RNA, 20 nt, Artificial Sequence
  HTT spacer sequence TTCN PAM
agguacaucaauaaaaauau

SEQ ID NO: 30927 - RNA, 20 nt, Artificial Sequence
  HTT spacer sequence TTCN PAM
gucuuaucaagugguggccu

SEQ ID NO: 30928 - RNA, 20 nt, Artificial Sequence
  HTT spacer sequence TTCN PAM
ugaucaauagccaggcaaaa

SEQ ID NO: 30929 - RNA, 20 nt, Artificial Sequence
  HTT spacer sequence TTCN PAM
auuuuugccuggcuauugau

SEQ ID NO: 30930 - RNA, 20 nt, Artificial Sequence
  HTT spacer sequence TTCN PAM
ugcugcuagugaaaaugcau

SEQ ID NO: 30931 - RNA, 20 nt, Artificial Sequence
  HTT spacer sequence TTCN PAM
cuagcagcaggaaaauucga

SEQ ID NO: 30932 - RNA, 20 nt, Artificial Sequence
  HTT spacer sequence TTCN PAM
auacaaugcauuuucacuag

SEQ ID NO: 30933 - RNA, 20 nt, Artificial Sequence
  HTT spacer sequence TTCN PAM
uguuuaguaaaauuccauac

SEQ ID NO: 30934 - RNA, 20 nt, Artificial Sequence
  HTT spacer sequence TTCN PAM
agaguaugaaaugcuauuau

SEQ ID NO: 30935 - RNA, 20 nt, Artificial Sequence
  HTT spacer sequence TTCN PAM
uacucuggaacaguaaacgu

SEQ ID NO: 30936 - RNA, 20 nt, Artificial Sequence
  HTT spacer sequence TTCN PAM
agccaugguuuuugaggggc

SEQ ID NO: 30937 - RNA, 20 nt, Artificial Sequence
  HTT spacer sequence TTCN PAM
cauuuuaauuguuguuacgg

SEQ ID NO: 30938 - RNA, 20 nt, Artificial Sequence
  HTT spacer sequence TTCN PAM
cccgugaccuguguaauaac

SEQ ID NO: 30939 - RNA, 20 nt, Artificial Sequence
  HTT spacer sequence TTCN PAM
aauauguuauuacacagguc

SEQ ID NO: 30940 - RNA, 20 nt, Artificial Sequence
  HTT spacer sequence TTCN PAM
gaccucgguuuggccacaga

SEQ ID NO: 30941 - RNA, 20 nt, Artificial Sequence
  HTT spacer sequence TTCN PAM
gggaucucuguggccaaacc

SEQ ID NO: 30942 - RNA, 20 nt, Artificial Sequence
  HTT spacer sequence TTCN PAM
aggaagaguuggaacagucg

SEQ ID NO: 30943 - RNA, 20 nt, Artificial Sequence
  HTT spacer sequence TTCN PAM
ucgaacccucuguccuucug

SEQ ID NO: 30944 - RNA, 20 nt, Artificial Sequence
  HTT spacer sequence TTCN PAM
aacucuuccucgaacccucu

SEQ ID NO: 30945 - RNA, 20 nt, Artificial Sequence
  HTT spacer sequence TTCN PAM
ugagaggcuuucggcguccu

SEQ ID NO: 30946 - RNA, 20 nt, Artificial Sequence
  HTT spacer sequence TTCN PAM
gcguccuuguccuuucuauc

SEQ ID NO: 30947 - RNA, 20 nt, Artificial Sequence
  HTT spacer sequence TTCN PAM
auccgggugccugagugccu

SEQ ID NO: 30948 - RNA, 20 nt, Artificial Sequence
  HTT spacer sequence TTCN PAM
gaggcacucaggcacccgga

SEQ ID NO: 30949 - RNA, 20 nt, Artificial Sequence
  HTT spacer sequence TTCN PAM
cuguguucugaggcacucag

SEQ ID NO: 30950 - RNA, 20 nt, Artificial Sequence
  HTT spacer sequence TTCN PAM
ggguggauuucucuguguuc

SEQ ID NO: 30951 - RNA, 20 nt, Artificial Sequence
  HTT spacer sequence TTCN PAM
aaacaccacugcgccaucua

SEQ ID NO: 30952 - RNA, 20 nt, Artificial Sequence
  HTT spacer sequence TTCN PAM
uacagaugaggggugaggcc

SEQ ID NO: 30953 - RNA, 20 nt, Artificial Sequence
  HTT spacer sequence TTCN PAM
cugagugaccucaggacuca

SEQ ID NO: 30954 - RNA, 20 nt, Artificial Sequence
  HTT spacer sequence TTCN PAM
gcccucacuucgcugaguga

SEQ ID NO: 30955 - RNA, 20 nt, Artificial Sequence
  HTT spacer sequence TTCN PAM
ugaggcuccgagaggccgug

SEQ ID NO: 30956 - RNA, 20 nt, Artificial Sequence
  HTT spacer sequence TTCN PAM
aaagauccgggggcagugcc

SEQ ID NO: 30957 - RNA, 20 nt, Artificial Sequence
  HTT spacer sequence TTCN PAM
ugcaggacucugcgaggcuc

SEQ ID NO: 30958 - RNA, 20 nt, Artificial Sequence
  HTT spacer sequence TTCN PAM
gcucuugcgucuuguggggu

SEQ ID NO: 30959 - RNA, 20 nt, Artificial Sequence
  HTT spacer sequence TTCN PAM
cugcccugggauagauggca

SEQ ID NO: 30960 - RNA, 20 nt, Artificial Sequence
  HTT spacer sequence TTCN PAM
ggagguggagccuucccuag

SEQ ID NO: 30961 - RNA, 20 nt, Artificial Sequence
  HTT spacer sequence TTCN PAM
cuagaccaccauuucccuug

SEQ ID NO: 30962 - RNA, 20 nt, Artificial Sequence
  HTT spacer sequence TTCN PAM
cuugugaaugugacucugug

SEQ ID NO: 30963 - RNA, 20 nt, Artificial Sequence
  HTT spacer sequence TTCN PAM
caagggaaaugguggucuag

SEQ ID NO: 30964 - RNA, 20 nt, Artificial Sequence
  HTT spacer sequence TTCN PAM
gcucaucuuggaugaaucau

SEQ ID NO: 30965 - RNA, 20 nt, Artificial Sequence
  HTT spacer sequence TTCN PAM
uccaagaugagcugaauugc

SEQ ID NO: 30966 - RNA, 20 nt, Artificial Sequence
  HTT spacer sequence TTCN PAM
uauaucaucaaguccaccag

SEQ ID NO: 30967 - RNA, 20 nt, Artificial Sequence
  HTT spacer sequence TTCN PAM
aacugguggacuugaugaua

SEQ ID NO: 30968 - RNA, 20 nt, Artificial Sequence
  HTT spacer sequence TTCN PAM
cagagucaugcaaccaucac

SEQ ID NO: 30969 - RNA, 20 nt, Artificial Sequence
  HTT spacer sequence TTCN PAM
caacuuuuuuuuuuuuuuga

SEQ ID NO: 30970 - RNA, 20 nt, Artificial Sequence
  HTT spacer sequence TTCN PAM
agccugggcgacugagugag

SEQ ID NO: 30971 - RNA, 20 nt, Artificial Sequence
  HTT spacer sequence TTCN PAM
ccugccucagcuuccugagu

SEQ ID NO: 30972 - RNA, 20 nt, Artificial Sequence
  HTT spacer sequence TTCN PAM
ugaguaucuggaacuacagg

SEQ ID NO: 30973 - RNA, 20 nt, Artificial Sequence
  HTT spacer sequence TTCN PAM
agauacucaggaagcugagg

SEQ ID NO: 30974 - RNA, 20 nt, Artificial Sequence
  HTT spacer sequence TTCN PAM
ccauguuguccaggcugguc

SEQ ID NO: 30975 - RNA, 20 nt, Artificial Sequence
  HTT spacer sequence TTCN PAM
ccucccaaaaugcugggauu

SEQ ID NO: 30976 - RNA, 20 nt, Artificial Sequence
  HTT spacer sequence TTCN PAM
uccauguugucacacacguu

SEQ ID NO: 30977 - RNA, 20 nt, Artificial Sequence
  HTT spacer sequence TTCN PAM
acgugugugacaacauggac

SEQ ID NO: 30978 - RNA, 20 nt, Artificial Sequence
  HTT spacer sequence TTCN PAM
caguaacacaguauacauuc

SEQ ID NO: 30979 - RNA, 20 nt, Artificial Sequence
  HTT spacer sequence TTCN PAM
uauaauucccaguaacacag

SEQ ID NO: 30980 - RNA, 20 nt, Artificial Sequence
  HTT spacer sequence TTCN PAM
auuuccuguauuuguuaugu

SEQ ID NO: 30981 - RNA, 20 nt, Artificial Sequence
  HTT spacer sequence TTCN PAM
uguauuuguuauguagcacc

SEQ ID NO: 30982 - RNA, 20 nt, Artificial Sequence
  HTT spacer sequence TTCN PAM
ggugcuacauaacaaauaca

SEQ ID NO: 30983 - RNA, 20 nt, Artificial Sequence
  HTT spacer sequence TTCN PAM
uuauugacaacuucaggugc

SEQ ID NO: 30984 - RNA, 20 nt, Artificial Sequence
  HTT spacer sequence TTCN PAM
uagaucagacagccaagucc

SEQ ID NO: 30985 - RNA, 20 nt, Artificial Sequence
  HTT spacer sequence TTCN PAM
gggacauucuccauucaaaa

SEQ ID NO: 30986 - RNA, 20 nt, Artificial Sequence
  HTT spacer sequence TTCN PAM
ccauucaaaaaauacaaaga

SEQ ID NO: 30987 - RNA, 20 nt, Artificial Sequence
  HTT spacer sequence TTCN PAM
aaaaauacaaagagaaaguc

SEQ ID NO: 30988 - RNA, 20 nt, Artificial Sequence
  HTT spacer sequence TTCN PAM
cuuuguauuuuuugaaugga

SEQ ID NO: 30989 - RNA, 20 nt, Artificial Sequence
  HTT spacer sequence TTCN PAM
uugaucgaccuccucccauu

SEQ ID NO: 30990 - RNA, 20 nt, Artificial Sequence
  HTT spacer sequence TTCN PAM
ugauucuuugaucgaccucc

SEQ ID NO: 30991 - RNA, 20 nt, Artificial Sequence
  HTT spacer sequence TTCN PAM
gagaaguuuucagaggaugc

SEQ ID NO: 30992 - RNA, 20 nt, Artificial Sequence
  HTT spacer sequence TTCN PAM
cagaauacuccucgguauca

SEQ ID NO: 30993 - RNA, 20 nt, Artificial Sequence
  HTT spacer sequence TTCN PAM
gaggaugccaaaucuaucug

SEQ ID NO: 30994 - RNA, 20 nt, Artificial Sequence
  HTT spacer sequence TTCN PAM
cagccucuacagagccugac

SEQ ID NO: 30995 - RNA, 20 nt, Artificial Sequence
  HTT spacer sequence TTCN PAM
cacucauucuaguuguuuuc

SEQ ID NO: 30996 - RNA, 20 nt, Artificial Sequence
  HTT spacer sequence TTCN PAM
aguuguuuucacuggcagcu

SEQ ID NO: 30997 - RNA, 20 nt, Artificial Sequence
  HTT spacer sequence TTCN PAM
cuggcagcuauaacaaaaaa

SEQ ID NO: 30998 - RNA, 20 nt, Artificial Sequence
  HTT spacer sequence TTCN PAM
gcaaguccuggucacccacc

SEQ ID NO: 30999 - RNA, 20 nt, Artificial Sequence
  HTT spacer sequence TTCN PAM
ggaggcucggguccaccugu

SEQ ID NO: 31000 - RNA, 20 nt, Artificial Sequence
  HTT spacer sequence TTCN PAM
ggaggcucagguccaccugu

SEQ ID NO: 31001 - RNA, 20 nt, Artificial Sequence
  HTT spacer sequence TTCN PAM
ggaggcucagguccaccugc

SEQ ID NO: 31002 - RNA, 20 nt, Artificial Sequence
  HTT spacer sequence TTCN PAM
uaagcaaacguguccucccu

SEQ ID NO: 31003 - RNA, 20 nt, Artificial Sequence
  HTT spacer sequence TTCN PAM
ccaugcuccugccacuggga

SEQ ID NO: 31004 - RNA, 20 nt, Artificial Sequence
  HTT spacer sequence TTCN PAM
ucagacaaaaagagccagug

SEQ ID NO: 31005 - RNA, 20 nt, Artificial Sequence
  HTT spacer sequence TTCN PAM
cacuggcucuuuuugucuga

SEQ ID NO: 31006 - RNA, 20 nt, Artificial Sequence
  HTT spacer sequence TTCN PAM
agacaugaucuggaaaugac

SEQ ID NO: 31007 - RNA, 20 nt, Artificial Sequence
  HTT spacer sequence TTCN PAM
agaucaugucuggaaacuuu

SEQ ID NO: 31008 - RNA, 20 nt, Artificial Sequence
  HTT spacer sequence TTCN PAM
ugguuugauuucucaaauaa

SEQ ID NO: 31009 - RNA, 20 nt, Artificial Sequence
  HTT spacer sequence TTCN PAM
caaauaaugcuacugaaagg

SEQ ID NO: 31010 - RNA, 20 nt, Artificial Sequence
  HTT spacer sequence TTCN PAM
guagcauuauuugagaaauc

SEQ ID NO: 31011 - RNA, 20 nt, Artificial Sequence
  HTT spacer sequence TTCN PAM
cuuucaguagcauuauuuga

SEQ ID NO: 31012 - RNA, 20 nt, Artificial Sequence
  HTT spacer sequence TTCN PAM
guuuucagaaaauagccaag

SEQ ID NO: 31013 - RNA, 20 nt, Artificial Sequence
  HTT spacer sequence TTCN PAM
gaaaauagccaagccuuguu

SEQ ID NO: 31014 - RNA, 20 nt, Artificial Sequence
  HTT spacer sequence TTCN PAM
gaaaacugaauuaauaaccu

SEQ ID NO: 31015 - RNA, 20 nt, Artificial Sequence
  HTT spacer sequence TTCN PAM
uugaccaauuuuauaugaag

SEQ ID NO: 31016 - RNA, 20 nt, Artificial Sequence
  HTT spacer sequence TTCN PAM
uauaaaauuggucaaugaaa

SEQ ID NO: 31017 - RNA, 20 nt, Artificial Sequence
  HTT spacer sequence TTCN PAM
uguauuuugagguggguaag

SEQ ID NO: 31018 - RNA, 20 nt, Artificial Sequence
  HTT spacer sequence TTCN PAM
gugugccuggcucugggccu

SEQ ID NO: 31019 - RNA, 20 nt, Artificial Sequence
  HTT spacer sequence TTCN PAM
uuaacugugcuaagggccuc

SEQ ID NO: 31020 - RNA, 20 nt, Artificial Sequence
  HTT spacer sequence TTCN PAM
gggaccagggaccaggucuc

SEQ ID NO: 31021 - RNA, 20 nt, Artificial Sequence
  HTT spacer sequence TTCN PAM
cucacugauugagugucugg

SEQ ID NO: 31022 - RNA, 20 nt, Artificial Sequence
  HTT spacer sequence TTCN PAM
uuuauuuucauucaacaagg

SEQ ID NO: 31023 - RNA, 20 nt, Artificial Sequence
  HTT spacer sequence TTCN PAM
uucaacaaggauuuauugag

SEQ ID NO: 31024 - RNA, 20 nt, Artificial Sequence
  HTT spacer sequence TTCN PAM
acaaggauuuauugagcauc

SEQ ID NO: 31025 - RNA, 20 nt, Artificial Sequence
  HTT spacer sequence TTCN PAM
aggcaccguccuaggcauug

SEQ ID NO: 31026 - RNA, 20 nt, Artificial Sequence
  HTT spacer sequence TTCN PAM
cccaaugccuaggacggugc

SEQ ID NO: 31027 - RNA, 20 nt, Artificial Sequence
  HTT spacer sequence TTCN PAM
auuugcugcuguuuccccca

SEQ ID NO: 31028 - RNA, 20 nt, Artificial Sequence
  HTT spacer sequence TTCN PAM
guucuauuugcugcuguuuc

SEQ ID NO: 31029 - RNA, 20 nt, Artificial Sequence
  HTT spacer sequence TTCN PAM
cgcuggcagggcggggacuu

SEQ ID NO: 31030 - RNA, 20 nt, Artificial Sequence
  HTT spacer sequence TTCN PAM
ugucaguucucgcuggcagg

SEQ ID NO: 31031 - RNA, 20 nt, Artificial Sequence
  HTT spacer sequence TTCN PAM
guuuccugucaguucucgcu

SEQ ID NO: 31032 - RNA, 20 nt, Artificial Sequence
  HTT spacer sequence TTCN PAM
ccguccuccagagugcgggu

SEQ ID NO: 31033 - RNA, 20 nt, Artificial Sequence
  HTT spacer sequence TTCN PAM
ugcucucugucccguccccc

SEQ ID NO: 31034 - RNA, 20 nt, Artificial Sequence
  HTT spacer sequence TTCN PAM
gcauggccugggcuuccugc

SEQ ID NO: 31035 - RNA, 20 nt, Artificial Sequence
  HTT spacer sequence TTCN PAM
ucugauggccaugaagccau

SEQ ID NO: 31036 - RNA, 20 nt, Artificial Sequence
  HTT spacer sequence TTCN PAM
uggccaucagaggaagcaac

SEQ ID NO: 31037 - RNA, 20 nt, Artificial Sequence
  HTT spacer sequence TTCN PAM
cagagcccugcgauggcuuc

SEQ ID NO: 31038 - RNA, 20 nt, Artificial Sequence
  HTT spacer sequence TTCN PAM
cucccaguggccggcaagcc

SEQ ID NO: 31039 - RNA, 20 nt, Artificial Sequence
  HTT spacer sequence TTCN PAM
uucucucccaguggccggca

SEQ ID NO: 31040 - RNA, 20 nt, Artificial Sequence
  HTT spacer sequence TTCN PAM
uccucccuguccauucauuc

SEQ ID NO: 31041 - RNA, 20 nt, Artificial Sequence
  HTT spacer sequence TTCN PAM
ggugagaguaaaggugacgc

SEQ ID NO: 31042 - RNA, 20 nt, Artificial Sequence
  HTT spacer sequence TTCN PAM
cacaccugcucugccaucac

SEQ ID NO: 31043 - RNA, 20 nt, Artificial Sequence
  HTT spacer sequence TTCN PAM
ggauggauccugaaggcagg

SEQ ID NO: 31044 - RNA, 20 nt, Artificial Sequence
  HTT spacer sequence TTCN PAM
ggauccauccugaaucugac

SEQ ID NO: 31045 - RNA, 20 nt, Artificial Sequence
  HTT spacer sequence TTCN PAM
ccaccaccugccuucaggau

SEQ ID NO: 31046 - RNA, 20 nt, Artificial Sequence
  HTT spacer sequence TTCN PAM
ggcugacuccaagaugggcu

SEQ ID NO: 31047 - RNA, 20 nt, Artificial Sequence
  HTT spacer sequence TTCN PAM
cuccagcccaucuuggaguc

SEQ ID NO: 31048 - RNA, 20 nt, Artificial Sequence
  HTT spacer sequence TTCN PAM
uccagugaccggagaggagg

SEQ ID NO: 31049 - RNA, 20 nt, Artificial Sequence
  HTT spacer sequence TTCN PAM
cagcccugcucacgucuccc

SEQ ID NO: 31050 - RNA, 20 nt, Artificial Sequence
  HTT spacer sequence TTCN PAM
uuuucucagauggucagccc

SEQ ID NO: 31051 - RNA, 20 nt, Artificial Sequence
  HTT spacer sequence TTCN PAM
cagauggucagccccuagug

SEQ ID NO: 31052 - RNA, 20 nt, Artificial Sequence
  HTT spacer sequence TTCN PAM
ucacaccugccucccaccuu

SEQ ID NO: 31053 - RNA, 20 nt, Artificial Sequence
  HTT spacer sequence TTCN PAM
agccuccccuuuccucacac

SEQ ID NO: 31054 - RNA, 20 nt, Artificial Sequence
  HTT spacer sequence TTCN PAM
aagccuucaagccuccccuu

SEQ ID NO: 31055 - RNA, 20 nt, Artificial Sequence
  HTT spacer sequence TTCN PAM
ucaacagcaucaagagccca

SEQ ID NO: 31056 - RNA, 20 nt, Artificial Sequence
  HTT spacer sequence TTCN PAM
gguccgcaugggcucuugau

SEQ ID NO: 31057 - RNA, 20 nt, Artificial Sequence
  HTT spacer sequence TTCN PAM
gccacaccuggacggugcag

SEQ ID NO: 31058 - RNA, 20 nt, Artificial Sequence
  HTT spacer sequence TTCN PAM
ucguccacuggagccagcgu

SEQ ID NO: 31059 - RNA, 20 nt, Artificial Sequence
  HTT spacer sequence TTCN PAM
cuguguccauuuccucgucc

SEQ ID NO: 31060 - RNA, 20 nt, Artificial Sequence
  HTT spacer sequence TTCN PAM
acaggaugggcaaagcaugg

SEQ ID NO: 31061 - RNA, 20 nt, Artificial Sequence
  HTT spacer sequence TTCN PAM
aacucuggccuggaggugua

SEQ ID NO: 31062 - RNA, 20 nt, Artificial Sequence
  HTT spacer sequence TTCN PAM
ucucugagcgucccucucau

SEQ ID NO: 31063 - RNA, 20 nt, Artificial Sequence
  HTT spacer sequence TTCN PAM
uccuccauccccccagugac

SEQ ID NO: 31064 - RNA, 20 nt, Artificial Sequence
  HTT spacer sequence TTCN PAM
ccagugacuucauccuccau

SEQ ID NO: 31065 - RNA, 20 nt, Artificial Sequence
  HTT spacer sequence TTCN PAM
cuucuccagugacuucaucc

SEQ ID NO: 31066 - RNA, 20 nt, Artificial Sequence
  HTT spacer sequence TTCN PAM
uagcagcugugccuggguaa

SEQ ID NO: 31067 - RNA, 20 nt, Artificial Sequence
  HTT spacer sequence TTCN PAM
gauguccuuuucauguguuu

SEQ ID NO: 31068 - RNA, 20 nt, Artificial Sequence
  HTT spacer sequence TTCN PAM
uguguuuccauauaugaagc

SEQ ID NO: 31069 - RNA, 20 nt, Artificial Sequence
  HTT spacer sequence TTCN PAM
auauaugaagccaugggugc

SEQ ID NO: 31070 - RNA, 20 nt, Artificial Sequence
  HTT spacer sequence TTCN PAM
uauauggaaacacaugaaaa

SEQ ID NO: 31071 - RNA, 20 nt, Artificial Sequence
  HTT spacer sequence TTCN PAM
cccggcuaccucacucugcu

SEQ ID NO: 31072 - RNA, 20 nt, Artificial Sequence
  HTT spacer sequence TTCN PAM
ucccacaggacacugacagg

SEQ ID NO: 31073 - RNA, 20 nt, Artificial Sequence
  HTT spacer sequence TTCN PAM
ugcagcccugucaguguccu

SEQ ID NO: 31074 - RNA, 20 nt, Artificial Sequence
  HTT spacer sequence TTCN PAM
gguacauauuuauacauucu

SEQ ID NO: 31075 - RNA, 20 nt, Artificial Sequence
  HTT spacer sequence TTCN PAM
guuuguuuuaggccuaacau

SEQ ID NO: 31076 - RNA, 20 nt, Artificial Sequence
  HTT spacer sequence TTCN PAM
cugcagucauuucuguuugu

SEQ ID NO: 31077 - RNA, 20 nt, Artificial Sequence
  HTT spacer sequence TTCN PAM
gcuuuuucacugcagucauu

SEQ ID NO: 31078 - RNA, 20 nt, Artificial Sequence
  HTT spacer sequence TTCN PAM
ccaucuuggccaggcugguc

SEQ ID NO: 31079 - RNA, 20 nt, Artificial Sequence
  HTT spacer sequence TTCN PAM
gaguaccugggauuacaggc

SEQ ID NO: 31080 - RNA, 20 nt, Artificial Sequence
  HTT spacer sequence TTCN PAM
uuuuugagacggagucaugc

SEQ ID NO: 31081 - RNA, 20 nt, Artificial Sequence
  HTT spacer sequence TTCN PAM
uuuuucuuuuuugagacgga

SEQ ID NO: 31082 - RNA, 20 nt, Artificial Sequence
  HTT spacer sequence TTCN PAM
uuucuuuuuucuuuuuugag

SEQ ID NO: 31083 - RNA, 20 nt, Artificial Sequence
  HTT spacer sequence TTCN PAM
gcuuuuucuuuucuuuuuuc

SEQ ID NO: 31084 - RNA, 20 nt, Artificial Sequence
  HTT spacer sequence TTCN PAM
gcuaggcucggggaggggaa

SEQ ID NO: 31085 - RNA, 20 nt, Artificial Sequence
  HTT spacer sequence TTCN PAM
ccuccccgagccuagcagaa

SEQ ID NO: 31086 - RNA, 20 nt, Artificial Sequence
  HTT spacer sequence TTCN PAM
uccccuccccgagccuagca

SEQ ID NO: 31087 - RNA, 20 nt, Artificial Sequence
  HTT spacer sequence TTCN PAM
auccacuuacgacacccauu

SEQ ID NO: 31088 - RNA, 20 nt, Artificial Sequence
  HTT spacer sequence TTCN PAM
agaugaaauccgugguguug

SEQ ID NO: 31089 - RNA, 20 nt, Artificial Sequence
  HTT spacer sequence TTCN PAM
ucuugaaagccccugagccu

SEQ ID NO: 31090 - RNA, 20 nt, Artificial Sequence
  HTT spacer sequence TTCN PAM
cagcaccuccaacaccacgg

SEQ ID NO: 31091 - RNA, 20 nt, Artificial Sequence
  HTT spacer sequence TTCN PAM
cacacagagcccucacucag

SEQ ID NO: 31092 - RNA, 20 nt, Artificial Sequence
  HTT spacer sequence TTCN PAM
aagcuagagcuucucacaca

SEQ ID NO: 31093 - RNA, 20 nt, Artificial Sequence
  HTT spacer sequence TTCN PAM
cauuuaugaaauguagauga

SEQ ID NO: 31094 - RNA, 20 nt, Artificial Sequence
  HTT spacer sequence TTCN PAM
uaaaugagaaacugagcugg

SEQ ID NO: 31095 - RNA, 20 nt, Artificial Sequence
  HTT spacer sequence TTCN PAM
uuuuauccucccaacaaucc

SEQ ID NO: 31096 - RNA, 20 nt, Artificial Sequence
  HTT spacer sequence TTCN PAM
ccucuuaguaauuauggagg

SEQ ID NO: 31097 - RNA, 20 nt, Artificial Sequence
  HTT spacer sequence TTCN PAM
uucuuaaagaauggguucua

SEQ ID NO: 31098 - RNA, 20 nt, Artificial Sequence
  HTT spacer sequence TTCN PAM
uaaagaauggguucuauggg

SEQ ID NO: 31099 - RNA, 20 nt, Artificial Sequence
  HTT spacer sequence TTCN PAM
uuaagaacgaacuguuucuc

SEQ ID NO: 31100 - RNA, 20 nt, Artificial Sequence
  HTT spacer sequence TTCN PAM
auggguuaacgacgucacac

SEQ ID NO: 31101 - RNA, 20 nt, Artificial Sequence
  HTT spacer sequence TTCN PAM
gucauagcagcccaaaggga

SEQ ID NO: 31102 - RNA, 20 nt, Artificial Sequence
  HTT spacer sequence TTCN PAM
gcuguugauaaauuacucag

SEQ ID NO: 31103 - RNA, 20 nt, Artificial Sequence
  HTT spacer sequence TTCN PAM
cagucaggaggcuggaaguc

SEQ ID NO: 31104 - RNA, 20 nt, Artificial Sequence
  HTT spacer sequence TTCN PAM
agccuccugacugagaaaau

SEQ ID NO: 31105 - RNA, 20 nt, Artificial Sequence
  HTT spacer sequence TTCN PAM
aagauggagccuuggcugga

SEQ ID NO: 31106 - RNA, 20 nt, Artificial Sequence
  HTT spacer sequence TTCN PAM
uuuaaaauauagacggcauc

SEQ ID NO: 31107 - RNA, 20 nt, Artificial Sequence
  HTT spacer sequence TTCN PAM
uucuuuuaaaauauagacgg

SEQ ID NO: 31108 - RNA, 20 nt, Artificial Sequence
  HTT spacer sequence TTCN PAM
uucuuucuuuuaaaauauag

SEQ ID NO: 31109 - RNA, 20 nt, Artificial Sequence
  HTT spacer sequence TTCN PAM
uucuuucuuucuuuuaaaau

SEQ ID NO: 31110 - RNA, 20 nt, Artificial Sequence
  HTT spacer sequence TTCN PAM
uuucuuucuuucuuucuuuu

SEQ ID NO: 31111 - RNA, 20 nt, Artificial Sequence
  HTT spacer sequence TTCN PAM
uuucuuuucuuucuuucuuu

SEQ ID NO: 31112 - RNA, 20 nt, Artificial Sequence
  HTT spacer sequence TTCN PAM
uucuuuucuuuucuuucuuu

SEQ ID NO: 31113 - RNA, 20 nt, Artificial Sequence
  HTT spacer sequence TTCN PAM
cacugcacccucacagggca

SEQ ID NO: 31114 - RNA, 20 nt, Artificial Sequence
  HTT spacer sequence TTCN PAM
aauggcaggaaucccauuca

SEQ ID NO: 31115 - RNA, 20 nt, Artificial Sequence
  HTT spacer sequence TTCN PAM
ugccauuagaaaaggggccc

SEQ ID NO: 31116 - RNA, 20 nt, Artificial Sequence
  HTT spacer sequence TTCN PAM
cgagggcagagccuucauga

SEQ ID NO: 31117 - RNA, 20 nt, Artificial Sequence
  HTT spacer sequence TTCN PAM
ugaccucaucaccuccagaa

SEQ ID NO: 31118 - RNA, 20 nt, Artificial Sequence
  HTT spacer sequence TTCN PAM
ggaggugaugaggucaugaa

SEQ ID NO: 31119 - RNA, 20 nt, Artificial Sequence
  HTT spacer sequence TTCN PAM
gcuuacagauuuguggggga

SEQ ID NO: 31120 - RNA, 20 nt, Artificial Sequence
  HTT spacer sequence TTCN PAM
gagcauccuggcccucgaug

SEQ ID NO: 31121 - RNA, 20 nt, Artificial Sequence
  HTT spacer sequence TTCN PAM
gcaucucagggacuccacag

SEQ ID NO: 31122 - RNA, 20 nt, Artificial Sequence
  HTT spacer sequence TTCN PAM
gaucuguuuuauuaauuuau

SEQ ID NO: 31123 - RNA, 20 nt, Artificial Sequence
  HTT spacer sequence TTCN PAM
uugagacggagucucaagaa

SEQ ID NO: 31124 - RNA, 20 nt, Artificial Sequence
  HTT spacer sequence TTCN PAM
ugagacuccgucucaaagaa

SEQ ID NO: 31125 - RNA, 20 nt, Artificial Sequence
  HTT spacer sequence TTCN PAM
agggauucuccugccucagg

SEQ ID NO: 31126 - RNA, 20 nt, Artificial Sequence
  HTT spacer sequence TTCN PAM
ccugccucaggcuccugagu

SEQ ID NO: 31127 - RNA, 20 nt, Artificial Sequence
  HTT spacer sequence TTCN PAM
ccauguuggccaggaugguc

SEQ ID NO: 31128 - RNA, 20 nt, Artificial Sequence
  HTT spacer sequence TTCN PAM
cauccguuuuaaauuaacaa

SEQ ID NO: 31129 - RNA, 20 nt, Artificial Sequence
  HTT spacer sequence TTCN PAM
uugcaugcuuuguuaauuua

SEQ ID NO: 31130 - RNA, 20 nt, Artificial Sequence
  HTT spacer sequence TTCN PAM
ggaagcuuugagucuagcag

SEQ ID NO: 31131 - RNA, 20 nt, Artificial Sequence
  HTT spacer sequence TTCN PAM
ugaagcuaaggcugugugac

SEQ ID NO: 31132 - RNA, 20 nt, Artificial Sequence
  HTT spacer sequence TTCN PAM
cagcaagaaauacuugucau

SEQ ID NO: 31133 - RNA, 20 nt, Artificial Sequence
  HTT spacer sequence TTCN PAM
ugcugagaaugagucauuug

SEQ ID NO: 31134 - RNA, 20 nt, Artificial Sequence
  HTT spacer sequence TTCN PAM
ggcccccauaccugcacuag

SEQ ID NO: 31135 - RNA, 20 nt, Artificial Sequence
  HTT spacer sequence TTCN PAM
gguuuuagcuuucuggcccc

SEQ ID NO: 31136 - RNA, 20 nt, Artificial Sequence
  HTT spacer sequence TTCN PAM
ucagguuuuagcuuucuggc

SEQ ID NO: 31137 - RNA, 20 nt, Artificial Sequence
  HTT spacer sequence TTCN PAM
gcuugcugacuccugcuaaa

SEQ ID NO: 31138 - RNA, 20 nt, Artificial Sequence
  HTT spacer sequence TTCN PAM
aucucccaccgcucucagcu

SEQ ID NO: 31139 - RNA, 20 nt, Artificial Sequence
  HTT spacer sequence TTCN PAM
ggucugcgcuucuaucuccc

SEQ ID NO: 31140 - RNA, 20 nt, Artificial Sequence
  HTT spacer sequence TTCN PAM
ggucuuugggacuuugaguu

SEQ ID NO: 31141 - RNA, 20 nt, Artificial Sequence
  HTT spacer sequence TTCN PAM
guaaggccagaugguaaaca

SEQ ID NO: 31142 - RNA, 20 nt, Artificial Sequence
  HTT spacer sequence TTCN PAM
acucugccgcuauaguggaa

SEQ ID NO: 31143 - RNA, 20 nt, Artificial Sequence
  HTT spacer sequence TTCN PAM
acuauagcggcagaguugaa

SEQ ID NO: 31144 - RNA, 20 nt, Artificial Sequence
  HTT spacer sequence TTCN PAM
aaaaccaggcagcuggugcc

SEQ ID NO: 31145 - RNA, 20 nt, Artificial Sequence
  HTT spacer sequence TTCN PAM
caagcccaggucuaggucac

SEQ ID NO: 31146 - RNA, 20 nt, Artificial Sequence
  HTT spacer sequence TTCN PAM
gggguccaggucuuucaugu

SEQ ID NO: 31147 - RNA, 20 nt, Artificial Sequence
  HTT spacer sequence TTCN PAM
uguguugcuuuugagcacag

SEQ ID NO: 31148 - RNA, 20 nt, Artificial Sequence
  HTT spacer sequence TTCN PAM
gauugaugagaauugcggag

SEQ ID NO: 31149 - RNA, 20 nt, Artificial Sequence
  HTT spacer sequence TTCN PAM
caucaaucagaaaaagcagg

SEQ ID NO: 31150 - RNA, 20 nt, Artificial Sequence
  HTT spacer sequence TTCN PAM
uccgcaauucucaucaauca

SEQ ID NO: 31151 - RNA, 20 nt, Artificial Sequence
  HTT spacer sequence TTCN PAM
ucacauacauauuuaccauc

SEQ ID NO: 31152 - RNA, 20 nt, Artificial Sequence
  HTT spacer sequence TTCN PAM
aaagagauccuuucugguaa

SEQ ID NO: 31153 - RNA, 20 nt, Artificial Sequence
  HTT spacer sequence TTCN PAM
gguaauuuuaagaauauacu

SEQ ID NO: 31154 - RNA, 20 nt, Artificial Sequence
  HTT spacer sequence TTCN PAM
uaaaauuaccagaaaggauc

SEQ ID NO: 31155 - RNA, 20 nt, Artificial Sequence
  HTT spacer sequence TTCN PAM
aguauauucuuaaaauuacc

SEQ ID NO: 31156 - RNA, 20 nt, Artificial Sequence
  HTT spacer sequence TTCN PAM
uaauauuuugguauucuagu

SEQ ID NO: 31157 - RNA, 20 nt, Artificial Sequence
  HTT spacer sequence TTCN PAM
caaaauaucuucuuaauauu

SEQ ID NO: 31158 - RNA, 20 nt, Artificial Sequence
  HTT spacer sequence TTCN PAM
gaaauugacaacaguuucug

SEQ ID NO: 31159 - RNA, 20 nt, Artificial Sequence
  HTT spacer sequence TTCN PAM
gaaauaccacuaaggaccuc

SEQ ID NO: 31160 - RNA, 20 nt, Artificial Sequence
  HTT spacer sequence TTCN PAM
guuuccucuuuaaaaauccc

SEQ ID NO: 31161 - RNA, 20 nt, Artificial Sequence
  HTT spacer sequence TTCN PAM
ucuuuaaaaauccccacauu

SEQ ID NO: 31162 - RNA, 20 nt, Artificial Sequence
  HTT spacer sequence TTCN PAM
uuaaguuaaaaaaauuaauc

SEQ ID NO: 31163 - RNA, 20 nt, Artificial Sequence
  HTT spacer sequence TTCN PAM
ccuuugagcuaucaauaaau

SEQ ID NO: 31164 - RNA, 20 nt, Artificial Sequence
  HTT spacer sequence TTCN PAM
ccccccuccuuugugaagug

SEQ ID NO: 31165 - RNA, 20 nt, Artificial Sequence
  HTT spacer sequence TTCN PAM
caaaggaggggggcgaaggu

SEQ ID NO: 31166 - RNA, 20 nt, Artificial Sequence
  HTT spacer sequence TTCN PAM
ugaggucugcuugaugcuug

SEQ ID NO: 31167 - RNA, 20 nt, Artificial Sequence
  HTT spacer sequence TTCN PAM
aagcaucaagcagaccucag

SEQ ID NO: 31168 - RNA, 20 nt, Artificial Sequence
  HTT spacer sequence TTCN PAM
ccguggucuccaucuccuga

SEQ ID NO: 31169 - RNA, 20 nt, Artificial Sequence
  HTT spacer sequence TTCN PAM
ccugccucagccucccgagu

SEQ ID NO: 31170 - RNA, 20 nt, Artificial Sequence
  HTT spacer sequence TTCN PAM
cgccauucuccugccucagc

SEQ ID NO: 31171 - RNA, 20 nt, Artificial Sequence
  HTT spacer sequence TTCN PAM
gucacccaggcuggagugca

SEQ ID NO: 31172 - RNA, 20 nt, Artificial Sequence
  HTT spacer sequence TTCN PAM
uuuuuugagauggagucucg

SEQ ID NO: 31173 - RNA, 20 nt, Artificial Sequence
  HTT spacer sequence TTCN PAM
uuuuuuuucuuuuuuugaga

SEQ ID NO: 31174 - RNA, 20 nt, Artificial Sequence
  HTT spacer sequence TTCN PAM
uuuuuauccagaggcucaag

SEQ ID NO: 31175 - RNA, 20 nt, Artificial Sequence
  HTT spacer sequence TTCN PAM
gccucuugcaguuacucacc

SEQ ID NO: 31176 - RNA, 20 nt, Artificial Sequence
  HTT spacer sequence TTCN PAM
uggugaguaacugcaagagg

SEQ ID NO: 31177 - RNA, 20 nt, Artificial Sequence
  HTT spacer sequence TTCN PAM
ccccagccgcucccucgccc

SEQ ID NO: 31178 - RNA, 20 nt, Artificial Sequence
  HTT spacer sequence TTCN PAM
aggacaucaacuucaggagg

SEQ ID NO: 31179 - RNA, 20 nt, Artificial Sequence
  HTT spacer sequence TTCN PAM
ggaggcuggaggcaaacaug

SEQ ID NO: 31180 - RNA, 20 nt, Artificial Sequence
  HTT spacer sequence TTCN PAM
guccugauguaagugcauug

SEQ ID NO: 31181 - RNA, 20 nt, Artificial Sequence
  HTT spacer sequence TTCN PAM
uagggcccugcucguccugg

SEQ ID NO: 31182 - RNA, 20 nt, Artificial Sequence
  HTT spacer sequence TTCN PAM
cuuucuuuuuucaaaaauag

SEQ ID NO: 31183 - RNA, 20 nt, Artificial Sequence
  HTT spacer sequence TTCN PAM
uuuuucaaaaauagagaugg

SEQ ID NO: 31184 - RNA, 20 nt, Artificial Sequence
  HTT spacer sequence TTCN PAM
aaaauagagauggggggucu

SEQ ID NO: 31185 - RNA, 20 nt, Artificial Sequence
  HTT spacer sequence TTCN PAM
guaucuguuguaauaaaaaa

SEQ ID NO: 31186 - RNA, 20 nt, Artificial Sequence
  HTT spacer sequence TTCN PAM
ucuucccucccccgucaccc

SEQ ID NO: 31187 - RNA, 20 nt, Artificial Sequence
  HTT spacer sequence TTCN PAM
ucccucccccgucaccccag

SEQ ID NO: 31188 - RNA, 20 nt, Artificial Sequence
  HTT spacer sequence TTCN PAM
cucccccgucaccccagugu

SEQ ID NO: 31189 - RNA, 20 nt, Artificial Sequence
  HTT spacer sequence TTCN PAM
cuucuuuucuagagacgggg

SEQ ID NO: 31190 - RNA, 20 nt, Artificial Sequence
  HTT spacer sequence TTCN PAM
uuucuagagacgggggucuc

SEQ ID NO: 31191 - RNA, 20 nt, Artificial Sequence
  HTT spacer sequence TTCN PAM
agagacgggggucucccuau

SEQ ID NO: 31192 - RNA, 20 nt, Artificial Sequence
  HTT spacer sequence TTCN PAM
aaaguagccugggcaacaua

SEQ ID NO: 31193 - RNA, 20 nt, Artificial Sequence
  HTT spacer sequence TTCN PAM
gggaggucaaggcaggagga

SEQ ID NO: 31194 - RNA, 20 nt, Artificial Sequence
  HTT spacer sequence TTCN PAM
ggucucagggcuggcuuucu

SEQ ID NO: 31195 - RNA, 20 nt, Artificial Sequence
  HTT spacer sequence TTCN PAM
cucucauucuuguguuuccc

SEQ ID NO: 31196 - RNA, 20 nt, Artificial Sequence
  HTT spacer sequence TTCN PAM
uguguuucccacagccguga

SEQ ID NO: 31197 - RNA, 20 nt, Artificial Sequence
  HTT spacer sequence TTCN PAM
cacagccgugaggcccugcu

SEQ ID NO: 31198 - RNA, 20 nt, Artificial Sequence
  HTT spacer sequence TTCN PAM
uuugucuggaacgcgugucc

SEQ ID NO: 31199 - RNA, 20 nt, Artificial Sequence
  HTT spacer sequence TTCN PAM
agacaaaggaagcagggccu

SEQ ID NO: 31200 - RNA, 20 nt, Artificial Sequence
  HTT spacer sequence TTCN PAM
caugagguccugggacugug

SEQ ID NO: 31201 - RNA, 20 nt, Artificial Sequence
  HTT spacer sequence TTCN PAM
ggguccucaguacggggcca

SEQ ID NO: 31202 - RNA, 20 nt, Artificial Sequence
  HTT spacer sequence TTCN PAM
ucuggacuguccccgagggg

SEQ ID NO: 31203 - RNA, 20 nt, Artificial Sequence
  HTT spacer sequence TTCN PAM
gccuccccaccuugagggua

SEQ ID NO: 31204 - RNA, 20 nt, Artificial Sequence
  HTT spacer sequence TTCN PAM
uacccucaagguggggaggc

SEQ ID NO: 31205 - RNA, 20 nt, Artificial Sequence
  HTT spacer sequence TTCN PAM
cucauucauacccucaaggu

SEQ ID NO: 31206 - RNA, 20 nt, Artificial Sequence
  HTT spacer sequence TTCN PAM
gcaaagcaguggcuccaaag

SEQ ID NO: 31207 - RNA, 20 nt, Artificial Sequence
  HTT spacer sequence TTCN PAM
cccaggacuugugcacuaca

SEQ ID NO: 31208 - RNA, 20 nt, Artificial Sequence
  HTT spacer sequence TTCN PAM
caggacugcgggugccuccg

SEQ ID NO: 31209 - RNA, 20 nt, Artificial Sequence
  HTT spacer sequence TTCN PAM
gugcuuuuuguuccuuugcc

SEQ ID NO: 31210 - RNA, 20 nt, Artificial Sequence
  HTT spacer sequence TTCN PAM
uuugcccugaaagugcaagg

SEQ ID NO: 31211 - RNA, 20 nt, Artificial Sequence
  HTT spacer sequence TTCN PAM
gggcaaaggaacaaaaagca

SEQ ID NO: 31212 - RNA, 20 nt, Artificial Sequence
  HTT spacer sequence TTCN PAM
uugcacuuucagggcaaagg

SEQ ID NO: 31213 - RNA, 20 nt, Artificial Sequence
  HTT spacer sequence TTCN PAM
ugucccagaggagggaccug

SEQ ID NO: 31214 - RNA, 20 nt, Artificial Sequence
  HTT spacer sequence TTCN PAM
gggagcugagcggagggaug

SEQ ID NO: 31215 - RNA, 20 nt, Artificial Sequence
  HTT spacer sequence TTCN PAM
cauccuccugcagguccacu

SEQ ID NO: 31216 - RNA, 20 nt, Artificial Sequence
  HTT spacer sequence TTCN PAM
ucagguuuucuccgggugcu

SEQ ID NO: 31217 - RNA, 20 nt, Artificial Sequence
  HTT spacer sequence TTCN PAM
ccgggugcuuugccaggagu

SEQ ID NO: 31218 - RNA, 20 nt, Artificial Sequence
  HTT spacer sequence TTCN PAM
uggugcacuccuggcaaagc

SEQ ID NO: 31219 - RNA, 20 nt, Artificial Sequence
  HTT spacer sequence TTCN PAM
cgccccugccuccaauucuu

SEQ ID NO: 31220 - RNA, 20 nt, Artificial Sequence
  HTT spacer sequence TTCN PAM
cacuucuccgguucugugcu

SEQ ID NO: 31221 - RNA, 20 nt, Artificial Sequence
  HTT spacer sequence TTCN PAM
ccgguucugugcugcaucuu

SEQ ID NO: 31222 - RNA, 20 nt, Artificial Sequence
  HTT spacer sequence TTCN PAM
gugcugcaucuuccaauacg

SEQ ID NO: 31223 - RNA, 20 nt, Artificial Sequence
  HTT spacer sequence TTCN PAM
aauacgugcaguccacccug

SEQ ID NO: 31224 - RNA, 20 nt, Artificial Sequence
  HTT spacer sequence TTCN PAM
guagugcaaaauggauugca

SEQ ID NO: 31225 - RNA, 20 nt, Artificial Sequence
  HTT spacer sequence TTCN PAM
ccuuuccguagugcaaaaug

SEQ ID NO: 31226 - RNA, 20 nt, Artificial Sequence
  HTT spacer sequence TTCN PAM
cacacacacacacacacaca

SEQ ID NO: 31227 - RNA, 20 nt, Artificial Sequence
  HTT spacer sequence TTCN PAM
ccagcuuuuagugucaccaa

SEQ ID NO: 31228 - RNA, 20 nt, Artificial Sequence
  HTT spacer sequence TTCN PAM
gaggacacauucugugauuu

SEQ ID NO: 31229 - RNA, 20 nt, Artificial Sequence
  HTT spacer sequence TTCN PAM
gugauuuagaaaaugccuca

SEQ ID NO: 31230 - RNA, 20 nt, Artificial Sequence
  HTT spacer sequence TTCN PAM
aaaucacagaauguguccuc

SEQ ID NO: 31231 - RNA, 20 nt, Artificial Sequence
  HTT spacer sequence TTCN PAM
uuugccaggccccucucacu

SEQ ID NO: 31232 - RNA, 20 nt, Artificial Sequence
  HTT spacer sequence TTCN PAM
uucuugggaacugagggagc

SEQ ID NO: 31233 - RNA, 20 nt, Artificial Sequence
  HTT spacer sequence TTCN PAM
ugggaacugagggagcugag

SEQ ID NO: 31234 - RNA, 20 nt, Artificial Sequence
  HTT spacer sequence TTCN PAM
caagaaugaaacgcccagca

SEQ ID NO: 31235 - RNA, 20 nt, Artificial Sequence
  HTT spacer sequence TTCN PAM
cagcucccucaguucccaag

SEQ ID NO: 31236 - RNA, 20 nt, Artificial Sequence
  HTT spacer sequence TTCN PAM
ugcuacacagccucaugccg

SEQ ID NO: 31237 - RNA, 20 nt, Artificial Sequence
  HTT spacer sequence TTCN PAM
cgguggugaaagggaucuac

SEQ ID NO: 31238 - RNA, 20 nt, Artificial Sequence
  HTT spacer sequence TTCN PAM
ccaccgagaacugcucgaua

SEQ ID NO: 31239 - RNA, 20 nt, Artificial Sequence
  HTT spacer sequence TTCN PAM
ucugcgguguccagguagau

SEQ ID NO: 31240 - RNA, 20 nt, Artificial Sequence
  HTT spacer sequence TTCN PAM
augcucgguuugcuaccggg

SEQ ID NO: 31241 - RNA, 20 nt, Artificial Sequence
  HTT spacer sequence TTCN PAM
gccaggggauggagacacac

SEQ ID NO: 31242 - RNA, 20 nt, Artificial Sequence
  HTT spacer sequence TTCN PAM
agcacagccgcuuuacguua

SEQ ID NO: 31243 - RNA, 20 nt, Artificial Sequence
  HTT spacer sequence TTCN PAM
aacagugacccagggaaaag

SEQ ID NO: 31244 - RNA, 20 nt, Artificial Sequence
  HTT spacer sequence TTCN PAM
cugggucacuguuggaacua

SEQ ID NO: 31245 - RNA, 20 nt, Artificial Sequence
  HTT spacer sequence TTCN PAM
agaccagccuggccaacaua

SEQ ID NO: 31246 - RNA, 20 nt, Artificial Sequence
  HTT spacer sequence TTCN PAM
cuauguuggccaggcugguc

SEQ ID NO: 31247 - RNA, 20 nt, Artificial Sequence
  HTT spacer sequence TTCN PAM
ccugccucagcaucccuacu

SEQ ID NO: 31248 - RNA, 20 nt, Artificial Sequence
  HTT spacer sequence TTCN PAM
agcgauucuccugccucagc

SEQ ID NO: 31249 - RNA, 20 nt, Artificial Sequence
  HTT spacer sequence TTCN PAM
gccucccagguucaagcgau

SEQ ID NO: 31250 - RNA, 20 nt, Artificial Sequence
  HTT spacer sequence TTCN PAM
gucgcccaagguggaguaca

SEQ ID NO: 31251 - RNA, 20 nt, Artificial Sequence
  HTT spacer sequence TTCN PAM
ucucacccaaaaaaaaaaaa

SEQ ID NO: 31252 - RNA, 20 nt, Artificial Sequence
  HTT spacer sequence TTCN PAM
ggacagcugcugauaugguc

SEQ ID NO: 31253 - RNA, 20 nt, Artificial Sequence
  HTT spacer sequence TTCN PAM
ugucauugggaccagggaca

SEQ ID NO: 31254 - RNA, 20 nt, Artificial Sequence
  HTT spacer sequence TTCN PAM
caugguaguucccugcuuug

SEQ ID NO: 31255 - RNA, 20 nt, Artificial Sequence
  HTT spacer sequence TTCN PAM
cugcuuugggaguacacuca

SEQ ID NO: 31256 - RNA, 20 nt, Artificial Sequence
  HTT spacer sequence TTCN PAM
aagaagaggucaggaagcag

SEQ ID NO: 31257 - RNA, 20 nt, Artificial Sequence
  HTT spacer sequence TTCN PAM
uggaauaaguaauguggucu

SEQ ID NO: 31258 - RNA, 20 nt, Artificial Sequence
  HTT spacer sequence TTCN PAM
ugaccucuucuuggaauaag

SEQ ID NO: 31259 - RNA, 20 nt, Artificial Sequence
  HTT spacer sequence TTCN PAM
cugcuuccugaccucuucuu

SEQ ID NO: 31260 - RNA, 20 nt, Artificial Sequence
  HTT spacer sequence TTCN PAM
uccuucccugcuuccugacc

SEQ ID NO: 31261 - RNA, 20 nt, Artificial Sequence
  HTT spacer sequence TTCN PAM
ggguuccuccuucccugcuu

SEQ ID NO: 31262 - RNA, 20 nt, Artificial Sequence
  HTT spacer sequence TTCN PAM
cugcggcuucucuguccugu

SEQ ID NO: 31263 - RNA, 20 nt, Artificial Sequence
  HTT spacer sequence TTCN PAM
cuguccuguuauucugugca

SEQ ID NO: 31264 - RNA, 20 nt, Artificial Sequence
  HTT spacer sequence TTCN PAM
gugcaugcagaugaucgaau

SEQ ID NO: 31265 - RNA, 20 nt, Artificial Sequence
  HTT spacer sequence TTCN PAM
aucaucugcaugcacagaau

SEQ ID NO: 31266 - RNA, 20 nt, Artificial Sequence
  HTT spacer sequence TTCN PAM
aagacaucaacaaaagugaa

SEQ ID NO: 31267 - RNA, 20 nt, Artificial Sequence
  HTT spacer sequence TTCN PAM
cuuuuguugaugucuuugaa

SEQ ID NO: 31268 - RNA, 20 nt, Artificial Sequence
  HTT spacer sequence TTCN PAM
ucacuuucacuuuuguugau

SEQ ID NO: 31269 - RNA, 20 nt, Artificial Sequence
  HTT spacer sequence TTCN PAM
ugucuagaucuaauggcaaa

SEQ ID NO: 31270 - RNA, 20 nt, Artificial Sequence
  HTT spacer sequence TTCN PAM
agaccaaacagaggcuucuu

SEQ ID NO: 31271 - RNA, 20 nt, Artificial Sequence
  HTT spacer sequence TTCN PAM
ucuauagacucuucagaaga

SEQ ID NO: 31272 - RNA, 20 nt, Artificial Sequence
  HTT spacer sequence TTCN PAM
auagacucuucagaagaggg

SEQ ID NO: 31273 - RNA, 20 nt, Artificial Sequence
  HTT spacer sequence TTCN PAM
gaagagggguaaaaagacuu

SEQ ID NO: 31274 - RNA, 20 nt, Artificial Sequence
  HTT spacer sequence TTCN PAM
gaagagucuauagaagaagc

SEQ ID NO: 31275 - RNA, 20 nt, Artificial Sequence
  HTT spacer sequence TTCN PAM
cauacacacacauauauuag

SEQ ID NO: 31276 - RNA, 20 nt, Artificial Sequence
  HTT spacer sequence TTCN PAM
ccuuggcagucaguauguuu

SEQ ID NO: 31277 - RNA, 20 nt, Artificial Sequence
  HTT spacer sequence TTCN PAM
guuugcgauggcuccuacag

SEQ ID NO: 31278 - RNA, 20 nt, Artificial Sequence
  HTT spacer sequence TTCN PAM
ggcuggccuccaccuagcac

SEQ ID NO: 31279 - RNA, 20 nt, Artificial Sequence
  HTT spacer sequence TTCN PAM
cauuguucuggcuggccucc

SEQ ID NO: 31280 - RNA, 20 nt, Artificial Sequence
  HTT spacer sequence TTCN PAM
ucccagcaacaaaccucacu

SEQ ID NO: 31281 - RNA, 20 nt, Artificial Sequence
  HTT spacer sequence TTCN PAM
gauccaaaacaggacuaccu

SEQ ID NO: 31282 - RNA, 20 nt, Artificial Sequence
  HTT spacer sequence TTCN PAM
agcauuuacaaacagguucc

SEQ ID NO: 31283 - RNA, 20 nt, Artificial Sequence
  HTT spacer sequence TTCN PAM
cgugucgcugacaaaauagu

SEQ ID NO: 31284 - RNA, 20 nt, Artificial Sequence
  HTT spacer sequence TTCN PAM
gagcccaguguaaacuauuu

SEQ ID NO: 31285 - RNA, 20 nt, Artificial Sequence
  HTT spacer sequence TTCN PAM
acaggaugccgauuucugag

SEQ ID NO: 31286 - RNA, 20 nt, Artificial Sequence
  HTT spacer sequence TTCN PAM
ucagauggcacucacagugc

SEQ ID NO: 31287 - RNA, 20 nt, Artificial Sequence
  HTT spacer sequence TTCN PAM
cccgcugcacggggaaagug

SEQ ID NO: 31288 - RNA, 20 nt, Artificial Sequence
  HTT spacer sequence TTCN PAM
ccgugcagcgggcgaaggag

SEQ ID NO: 31289 - RNA, 20 nt, Artificial Sequence
  HTT spacer sequence TTCN PAM
uuuuugaaaagggaauccug

SEQ ID NO: 31290 - RNA, 20 nt, Artificial Sequence
  HTT spacer sequence TTCN PAM
aaaaggaauccacuuucccc

SEQ ID NO: 31291 - RNA, 20 nt, Artificial Sequence
  HTT spacer sequence TTCN PAM
cuuuucaaaaaggaauccac

SEQ ID NO: 31292 - RNA, 20 nt, Artificial Sequence
  HTT spacer sequence TTCN PAM
acuaaaaauacaaaacuuag

SEQ ID NO: 31293 - RNA, 20 nt, Artificial Sequence
  HTT spacer sequence TTCN PAM
ccugccucagccucccaagu

SEQ ID NO: 31294 - RNA, 20 nt, Artificial Sequence
  HTT spacer sequence TTCN PAM
cgcgauucuccugccucagc

SEQ ID NO: 31295 - RNA, 20 nt, Artificial Sequence
  HTT spacer sequence TTCN PAM
uuuugagauggagucuugcg

SEQ ID NO: 31296 - RNA, 20 nt, Artificial Sequence
  HTT spacer sequence TTCN PAM
uucuuuuugagauggagucu

SEQ ID NO: 31297 - RNA, 20 nt, Artificial Sequence
  HTT spacer sequence TTCN PAM
uucuuucuuuuugagaugga

SEQ ID NO: 31298 - RNA, 20 nt, Artificial Sequence
  HTT spacer sequence TTCN PAM
auuuuucuuucuuucuuuuu

SEQ ID NO: 31299 - RNA, 20 nt, Artificial Sequence
  HTT spacer sequence TTCN PAM
aaaggauuccauuuuucuuu

SEQ ID NO: 31300 - RNA, 20 nt, Artificial Sequence
  HTT spacer sequence TTCN PAM
guaauagcauuaaauguaga

SEQ ID NO: 31301 - RNA, 20 nt, Artificial Sequence
  HTT spacer sequence TTCN PAM
augcaaagugucucuccuug

SEQ ID NO: 31302 - RNA, 20 nt, Artificial Sequence
  HTT spacer sequence TTCN PAM
ugggccauccuacuuugcac

SEQ ID NO: 31303 - RNA, 20 nt, Artificial Sequence
  HTT spacer sequence TTCN PAM
caggggguugauucagagcu

SEQ ID NO: 31304 - RNA, 20 nt, Artificial Sequence
  HTT spacer sequence TTCN PAM
gagcuuggccacuaacauuc

SEQ ID NO: 31305 - RNA, 20 nt, Artificial Sequence
  HTT spacer sequence TTCN PAM
aauccaucuuucuuucagua

SEQ ID NO: 31306 - RNA, 20 nt, Artificial Sequence
  HTT spacer sequence TTCN PAM
uucaguaugaaaaauaggcu

SEQ ID NO: 31307 - RNA, 20 nt, Artificial Sequence
  HTT spacer sequence TTCN PAM
guaugaaaaauaggcuaggc

SEQ ID NO: 31308 - RNA, 20 nt, Artificial Sequence
  HTT spacer sequence TTCN PAM
uacugaaagaaagauggauu

SEQ ID NO: 31309 - RNA, 20 nt, Artificial Sequence
  HTT spacer sequence TTCN PAM
agaccagcuuagccaacaug

SEQ ID NO: 31310 - RNA, 20 nt, Artificial Sequence
  HTT spacer sequence TTCN PAM
ccauguuggcuaagcugguc

SEQ ID NO: 31311 - RNA, 20 nt, Artificial Sequence
  HTT spacer sequence TTCN PAM
ccugccucagacucccaggu

SEQ ID NO: 31312 - RNA, 20 nt, Artificial Sequence
  HTT spacer sequence TTCN PAM
agcgauucuccugccucaga

SEQ ID NO: 31313 - RNA, 20 nt, Artificial Sequence
  HTT spacer sequence TTCN PAM
cucuugucacccaggcugga

SEQ ID NO: 31314 - RNA, 20 nt, Artificial Sequence
  HTT spacer sequence TTCN PAM
uuuuuuuuuuuuuuuuuuua

SEQ ID NO: 31315 - RNA, 20 nt, Artificial Sequence
  HTT spacer sequence TTCN PAM
caccuaaagcuuauuuuuuu

SEQ ID NO: 31316 - RNA, 20 nt, Artificial Sequence
  HTT spacer sequence TTCN PAM
cauggcugucuuuccucuga

SEQ ID NO: 31317 - RNA, 20 nt, Artificial Sequence
  HTT spacer sequence TTCN PAM
ucugagaacuaaggguuagg

SEQ ID NO: 31318 - RNA, 20 nt, Artificial Sequence
  HTT spacer sequence TTCN PAM
cagaggaaagacagccaugg

SEQ ID NO: 31319 - RNA, 20 nt, Artificial Sequence
  HTT spacer sequence TTCN PAM
caccuaacccuuaguucuca

SEQ ID NO: 31320 - RNA, 20 nt, Artificial Sequence
  HTT spacer sequence TTCN PAM
augcagggcuggcuacacac

SEQ ID NO: 31321 - RNA, 20 nt, Artificial Sequence
  HTT spacer sequence TTCN PAM
aucuccaaguguggacacug

SEQ ID NO: 31322 - RNA, 20 nt, Artificial Sequence
  HTT spacer sequence TTCN PAM
cacguuuuggggaaaaccug

SEQ ID NO: 31323 - RNA, 20 nt, Artificial Sequence
  HTT spacer sequence TTCN PAM
ccaaaacgugggaaccuggg

SEQ ID NO: 31324 - RNA, 20 nt, Artificial Sequence
  HTT spacer sequence TTCN PAM
cucaacggcagguuuucccc

SEQ ID NO: 31325 - RNA, 20 nt, Artificial Sequence
  HTT spacer sequence TTCN PAM
cucugugcaaucagauucuc

SEQ ID NO: 31326 - RNA, 20 nt, Artificial Sequence
  HTT spacer sequence TTCN PAM
ccccacacugcuucuuaggc

SEQ ID NO: 31327 - RNA, 20 nt, Artificial Sequence
  HTT spacer sequence TTCN PAM
uaggcagccagagacccugu

SEQ ID NO: 31328 - RNA, 20 nt, Artificial Sequence
  HTT spacer sequence TTCN PAM
ugccucagccaugguacaug

SEQ ID NO: 31329 - RNA, 20 nt, Artificial Sequence
  HTT spacer sequence TTCN PAM
gcauguaccauggcugaggc

SEQ ID NO: 31330 - RNA, 20 nt, Artificial Sequence
  HTT spacer sequence TTCN PAM
uauguaugugagcuaagcau

SEQ ID NO: 31331 - RNA, 20 nt, Artificial Sequence
  HTT spacer sequence TTCN PAM
ugaugugguagaugcuuagc

SEQ ID NO: 31332 - RNA, 20 nt, Artificial Sequence
  HTT spacer sequence TTCN PAM
ccuuauuuacuucaugaugu

SEQ ID NO: 31333 - RNA, 20 nt, Artificial Sequence
  HTT spacer sequence TTCN PAM
gguuuuugccugccuuaaaa

SEQ ID NO: 31334 - RNA, 20 nt, Artificial Sequence
  HTT spacer sequence TTCN PAM
agagcaaccuggccaacaug

SEQ ID NO: 31335 - RNA, 20 nt, Artificial Sequence
  HTT spacer sequence TTCN PAM
ccauguuggccagguugcuc

SEQ ID NO: 31336 - RNA, 20 nt, Artificial Sequence
  HTT spacer sequence TTCN PAM
ucagccuccugaguagcuag

SEQ ID NO: 31337 - RNA, 20 nt, Artificial Sequence
  HTT spacer sequence TTCN PAM
ccuuccucagccuccugagu

SEQ ID NO: 31338 - RNA, 20 nt, Artificial Sequence
  HTT spacer sequence TTCN PAM
agcaauucuccuuccucagc

SEQ ID NO: 31339 - RNA, 20 nt, Artificial Sequence
  HTT spacer sequence TTCN PAM
agguucaagcaauucuccuu

SEQ ID NO: 31340 - RNA, 20 nt, Artificial Sequence
  HTT spacer sequence TTCN PAM
uuaagugcagacaaccauuu

SEQ ID NO: 31341 - RNA, 20 nt, Artificial Sequence
  HTT spacer sequence TTCN PAM
cuuuccuuaagugcagacaa

SEQ ID NO: 31342 - RNA, 20 nt, Artificial Sequence
  HTT spacer sequence TTCN PAM
caucagccgugugccugagg

SEQ ID NO: 31343 - RNA, 20 nt, Artificial Sequence
  HTT spacer sequence TTCN PAM
cacuggggaccauggucagg

SEQ ID NO: 31344 - RNA, 20 nt, Artificial Sequence
  HTT spacer sequence TTCN PAM
uucucacuggggaccauggu

SEQ ID NO: 31345 - RNA, 20 nt, Artificial Sequence
  HTT spacer sequence TTCN PAM
acuuccuucucacuggggac

SEQ ID NO: 31346 - RNA, 20 nt, Artificial Sequence
  HTT spacer sequence TTCN PAM
uggcgccagggucugcucug

SEQ ID NO: 31347 - RNA, 20 nt, Artificial Sequence
  HTT spacer sequence TTCN PAM
aggugggacgagacgcuaac

SEQ ID NO: 31348 - RNA, 20 nt, Artificial Sequence
  HTT spacer sequence TTCN PAM
gcacuaauaccugaguuguc

SEQ ID NO: 31349 - RNA, 20 nt, Artificial Sequence
  HTT spacer sequence TTCN PAM
cuaaagcuggauugaagaaa

SEQ ID NO: 31350 - RNA, 20 nt, Artificial Sequence
  HTT spacer sequence TTCN PAM
auccagcuuuagugaaaaga

SEQ ID NO: 31351 - RNA, 20 nt, Artificial Sequence
  HTT spacer sequence TTCN PAM
ucaauccagcuuuagugaaa

SEQ ID NO: 31352 - RNA, 20 nt, Artificial Sequence
  HTT spacer sequence TTCN PAM
gugcuggggugcccaggugu

SEQ ID NO: 31353 - RNA, 20 nt, Artificial Sequence
  HTT spacer sequence TTCN PAM
cugcacccagggagaggcca

SEQ ID NO: 31354 - RNA, 20 nt, Artificial Sequence
  HTT spacer sequence TTCN PAM
caagcccccgcuggccucuc

SEQ ID NO: 31355 - RNA, 20 nt, Artificial Sequence
  HTT spacer sequence TTCN PAM
uggaccaccacaucucuggc

SEQ ID NO: 31356 - RNA, 20 nt, Artificial Sequence
  HTT spacer sequence TTCN PAM
ccagggcccgggugucagac

SEQ ID NO: 31357 - RNA, 20 nt, Artificial Sequence
  HTT spacer sequence TTCN PAM
ugcaucucccgauggcuguc

SEQ ID NO: 31358 - RNA, 20 nt, Artificial Sequence
  HTT spacer sequence TTCN PAM
uucgguuuguguguuugugg

SEQ ID NO: 31359 - RNA, 20 nt, Artificial Sequence
  HTT spacer sequence TTCN PAM
guuuguguguuuguggccag

SEQ ID NO: 31360 - RNA, 20 nt, Artificial Sequence
  HTT spacer sequence TTCN PAM
uuuucucugagcauaucuau

SEQ ID NO: 31361 - RNA, 20 nt, Artificial Sequence
  HTT spacer sequence TTCN PAM
cugagcauaucuaucugccc

SEQ ID NO: 31362 - RNA, 20 nt, Artificial Sequence
  HTT spacer sequence TTCN PAM
agggcagauagauaugcuca

SEQ ID NO: 31363 - RNA, 20 nt, Artificial Sequence
  HTT spacer sequence TTCN PAM
cguggagguuaagggcgcug

SEQ ID NO: 31364 - RNA, 20 nt, Artificial Sequence
  HTT spacer sequence TTCN PAM
gcgcccuuaaccuccacggg

SEQ ID NO: 31365 - RNA, 20 nt, Artificial Sequence
  HTT spacer sequence TTCN PAM
gcuggggugcucacccgcgg

SEQ ID NO: 31366 - RNA, 20 nt, Artificial Sequence
  HTT spacer sequence TTCN PAM
ccaagcgcacaaagccacgu

SEQ ID NO: 31367 - RNA, 20 nt, Artificial Sequence
  HTT spacer sequence TTCN PAM
gcuacgcccuggcguggggu

SEQ ID NO: 31368 - RNA, 20 nt, Artificial Sequence
  HTT spacer sequence TTCN PAM
gugccgguccacacccuucc

SEQ ID NO: 31369 - RNA, 20 nt, Artificial Sequence
  HTT spacer sequence TTCN PAM
ugcccuggcacacgcacggg

SEQ ID NO: 31370 - RNA, 20 nt, Artificial Sequence
  HTT spacer sequence TTCN PAM
cagggggcgacguuggagcu

SEQ ID NO: 31371 - RNA, 20 nt, Artificial Sequence
  HTT spacer sequence TTCN PAM
cuccccgcccagcuccaacg

SEQ ID NO: 31372 - RNA, 20 nt, Artificial Sequence
  HTT spacer sequence TTCN PAM
aggccgccagcgagggcccu

SEQ ID NO: 31373 - RNA, 20 nt, Artificial Sequence
  HTT spacer sequence TTCN PAM
cuaaggaucugggcgcagcu

SEQ ID NO: 31374 - RNA, 20 nt, Artificial Sequence
  HTT spacer sequence TTCN PAM
gcaccuucucuaaggaucug

SEQ ID NO: 31375 - RNA, 20 nt, Artificial Sequence
  HTT spacer sequence TTCN PAM
ugaacugugcuucgcaggau

SEQ ID NO: 31376 - RNA, 20 nt, Artificial Sequence
  HTT spacer sequence TTCN PAM
ggaaaaaggcccaaguuccg

SEQ ID NO: 31377 - RNA, 20 nt, Artificial Sequence
  HTT spacer sequence TTCN PAM
caggaugggccggcccggcg

SEQ ID NO: 31378 - RNA, 20 nt, Artificial Sequence
  HTT spacer sequence TTCN PAM
gcagggcagggcagcacuug

SEQ ID NO: 31379 - RNA, 20 nt, Artificial Sequence
  HTT spacer sequence TTCN PAM
gggaggagcugacggggaca

SEQ ID NO: 31380 - RNA, 20 nt, Artificial Sequence
  HTT spacer sequence TTCN PAM
ccuccgccccauccauucuc

SEQ ID NO: 31381 - RNA, 20 nt, Artificial Sequence
  HTT spacer sequence TTCN PAM
ccacugcugucagggcugcc

SEQ ID NO: 31382 - RNA, 20 nt, Artificial Sequence
  HTT spacer sequence TTCN PAM
cacgcagcaggcagcacaga

SEQ ID NO: 31383 - RNA, 20 nt, Artificial Sequence
  HTT spacer sequence TTCN PAM
aagucaccgaggccugugcc

SEQ ID NO: 31384 - RNA, 20 nt, Artificial Sequence
  HTT spacer sequence TTCN PAM
ucucccgcgcgcagcugucc

SEQ ID NO: 31385 - RNA, 20 nt, Artificial Sequence
  HTT spacer sequence TTCN PAM
caagagcagcaggagcgacc

SEQ ID NO: 31386 - RNA, 20 nt, Artificial Sequence
  HTT spacer sequence TTCN PAM
aggcggacguuucccuugca

SEQ ID NO: 31387 - RNA, 20 nt, Artificial Sequence
  HTT spacer sequence TTCN PAM
cuugcaucggggugugggga

SEQ ID NO: 31388 - RNA, 20 nt, Artificial Sequence
  HTT spacer sequence TTCN PAM
ccacaccccgaugcaaggga

SEQ ID NO: 31389 - RNA, 20 nt, Artificial Sequence
  HTT spacer sequence TTCN PAM
gcaggugcccaccgccggcu

SEQ ID NO: 31390 - RNA, 20 nt, Artificial Sequence
  HTT spacer sequence TTCN PAM
ucccaggacgggccccagug

SEQ ID NO: 31391 - RNA, 20 nt, Artificial Sequence
  HTT spacer sequence TTCN PAM
uuguacgaggggaaggggaa

SEQ ID NO: 31392 - RNA, 20 nt, Artificial Sequence
  HTT spacer sequence TTCN PAM
ccucguacaaagaaggcucc

SEQ ID NO: 31393 - RNA, 20 nt, Artificial Sequence
  HTT spacer sequence TTCN PAM
ccuuccccucguacaaagaa

SEQ ID NO: 31394 - RNA, 20 nt, Artificial Sequence
  HTT spacer sequence TTCN PAM
uugggggaauggaaauagcu

SEQ ID NO: 31395 - RNA, 20 nt, Artificial Sequence
  HTT spacer sequence TTCN PAM
cccaaagaauaaagacccca

SEQ ID NO: 31396 - RNA, 20 nt, Artificial Sequence
  HTT spacer sequence TTCN PAM
auucccccaaagaauaaaga

SEQ ID NO: 31397 - RNA, 20 nt, Artificial Sequence
  HTT spacer sequence TTCN PAM
ucugauugaggcaaaacuca

SEQ ID NO: 31398 - RNA, 20 nt, Artificial Sequence
  HTT spacer sequence TTCN PAM
gauugaggcaaaacucauua

SEQ ID NO: 31399 - RNA, 20 nt, Artificial Sequence
  HTT spacer sequence TTCN PAM
aaaaagccuuacucuuuaau

SEQ ID NO: 31400 - RNA, 20 nt, Artificial Sequence
  HTT spacer sequence TTCN PAM
gcagcugaggacagugaggc

SEQ ID NO: 31401 - RNA, 20 nt, Artificial Sequence
  HTT spacer sequence TTCN PAM
uucugcagcugaggacagug

SEQ ID NO: 31402 - RNA, 20 nt, Artificial Sequence
  HTT spacer sequence TTCN PAM
gagucuguaaaucauguagc

SEQ ID NO: 31403 - RNA, 20 nt, Artificial Sequence
  HTT spacer sequence TTCN PAM
acacugugcuacaugauuua

SEQ ID NO: 31404 - RNA, 20 nt, Artificial Sequence
  HTT spacer sequence TTCN PAM
guaacuaugccaauaaucgu

SEQ ID NO: 31405 - RNA, 20 nt, Artificial Sequence
  HTT spacer sequence TTCN PAM
cacgauuauuggcauaguua

SEQ ID NO: 31406 - RNA, 20 nt, Artificial Sequence
  HTT spacer sequence TTCN PAM
gcaaugagcagguauuauuu

SEQ ID NO: 31407 - RNA, 20 nt, Artificial Sequence
  HTT spacer sequence TTCN PAM
uguauuuucugcaaugagca

SEQ ID NO: 31408 - RNA, 20 nt, Artificial Sequence
  HTT spacer sequence TTCN PAM
ugcauguuuuccuguauuuu

SEQ ID NO: 31409 - RNA, 20 nt, Artificial Sequence
  HTT spacer sequence TTCN PAM
uuccugcauguuuuccugua

SEQ ID NO: 31410 - RNA, 20 nt, Artificial Sequence
  HTT spacer sequence TTCN PAM
acccccacccccauuuccac

SEQ ID NO: 31411 - RNA, 20 nt, Artificial Sequence
  HTT spacer sequence TTCN PAM
acucugacucuuuccaggag

SEQ ID NO: 31412 - RNA, 20 nt, Artificial Sequence
  HTT spacer sequence TTCN PAM
aggaguucuuccaucagugu

SEQ ID NO: 31413 - RNA, 20 nt, Artificial Sequence
  HTT spacer sequence TTCN PAM
uccaucaguguagacaaagu

SEQ ID NO: 31414 - RNA, 20 nt, Artificial Sequence
  HTT spacer sequence TTCN PAM
aucaguguagacaaagucca

SEQ ID NO: 31415 - RNA, 20 nt, Artificial Sequence
  HTT spacer sequence TTCN PAM
gcuguggacuuugucuacac

SEQ ID NO: 31416 - RNA, 20 nt, Artificial Sequence
  HTT spacer sequence TTCN PAM
uugccagccacagggccucu

SEQ ID NO: 31417 - RNA, 20 nt, Artificial Sequence
  HTT spacer sequence TTCN PAM
acaccugcgcgaggcaggcc

SEQ ID NO: 31418 - RNA, 20 nt, Artificial Sequence
  HTT spacer sequence TTCN PAM
aaugccucugacaggcaggu

SEQ ID NO: 31419 - RNA, 20 nt, Artificial Sequence
  HTT spacer sequence TTCN PAM
agauggaguugcucuuguuc

SEQ ID NO: 31420 - RNA, 20 nt, Artificial Sequence
  HTT spacer sequence TTCN PAM
caggagguuaggcauucuua

SEQ ID NO: 31421 - RNA, 20 nt, Artificial Sequence
  HTT spacer sequence TTCN PAM
uaguuacaggaugagauagg

SEQ ID NO: 31422 - RNA, 20 nt, Artificial Sequence
  HTT spacer sequence TTCN PAM
uuaaaacagucuguuuuauc

SEQ ID NO: 31423 - RNA, 20 nt, Artificial Sequence
  HTT spacer sequence TTCN PAM
cuauuuuggccagggugguc

SEQ ID NO: 31424 - RNA, 20 nt, Artificial Sequence
  HTT spacer sequence TTCN PAM
ccugccucagccucccgagu

SEQ ID NO: 31425 - RNA, 20 nt, Artificial Sequence
  HTT spacer sequence TTCN PAM
agagauucuccugccucagc

SEQ ID NO: 31426 - RNA, 20 nt, Artificial Sequence
  HTT spacer sequence TTCN PAM
uuauuuuauuauuuuuuuug

SEQ ID NO: 31427 - RNA, 20 nt, Artificial Sequence
  HTT spacer sequence TTCN PAM
uuauuuacuucuuuauuuua

SEQ ID NO: 31428 - RNA, 20 nt, Artificial Sequence
  HTT spacer sequence TTCN PAM
cagcuucuuuauuuacuucu

SEQ ID NO: 31429 - RNA, 20 nt, Artificial Sequence
  HTT spacer sequence TTCN PAM
gaugccauggcaacgucuga

SEQ ID NO: 31430 - RNA, 20 nt, Artificial Sequence
  HTT spacer sequence TTCN PAM
gacguugccauggcaucuga

SEQ ID NO: 31431 - RNA, 20 nt, Artificial Sequence
  HTT spacer sequence TTCN PAM
aaaaagaggaggaacucuca

SEQ ID NO: 31432 - RNA, 20 nt, Artificial Sequence
  HTT spacer sequence TTCN PAM
uccucuuuuuagaacauaca

SEQ ID NO: 31433 - RNA, 20 nt, Artificial Sequence
  HTT spacer sequence TTCN PAM
gggaaucgcccaccccuuuc

SEQ ID NO: 31434 - RNA, 20 nt, Artificial Sequence
  HTT spacer sequence TTCN PAM
cagaacugagaguuccuccu

SEQ ID NO: 31435 - RNA, 20 nt, Artificial Sequence
  HTT spacer sequence TTCN PAM
cagaaaucucaugaauaauc

SEQ ID NO: 31436 - RNA, 20 nt, Artificial Sequence
  HTT spacer sequence TTCN PAM
gggaaaggggugggcgauuc

SEQ ID NO: 31437 - RNA, 20 nt, Artificial Sequence
  HTT spacer sequence TTCN PAM
ugagauuucugggaaagggg

SEQ ID NO: 31438 - RNA, 20 nt, Artificial Sequence
  HTT spacer sequence TTCN PAM
ugauuauaugcuaaacaagg

SEQ ID NO: 31439 - RNA, 20 nt, Artificial Sequence
  HTT spacer sequence TTCN PAM
uuauuccuuuacuuuccuaa

SEQ ID NO: 31440 - RNA, 20 nt, Artificial Sequence
  HTT spacer sequence TTCN PAM
uuuacuuuccuaagaaacuu

SEQ ID NO: 31441 - RNA, 20 nt, Artificial Sequence
  HTT spacer sequence TTCN PAM
uaagaaacuugcuuucccuu

SEQ ID NO: 31442 - RNA, 20 nt, Artificial Sequence
  HTT spacer sequence TTCN PAM
uaggaaaguaaaggaauaaa

SEQ ID NO: 31443 - RNA, 20 nt, Artificial Sequence
  HTT spacer sequence TTCN PAM
cuuuauggauuagccucgaa

SEQ ID NO: 31444 - RNA, 20 nt, Artificial Sequence
  HTT spacer sequence TTCN PAM
aggcuaauccauaaagggaa

SEQ ID NO: 31445 - RNA, 20 nt, Artificial Sequence
  HTT spacer sequence TTCN PAM
ugagcgagauccaaguaccc

SEQ ID NO: 31446 - RNA, 20 nt, Artificial Sequence
  HTT spacer sequence TTCN PAM
uccucagcaggcaagaugga

SEQ ID NO: 31447 - RNA, 20 nt, Artificial Sequence
  HTT spacer sequence TTCN PAM
caggucuaguuuccuccuca

SEQ ID NO: 31448 - RNA, 20 nt, Artificial Sequence
  HTT spacer sequence TTCN PAM
uacccugggcugguggcuau

SEQ ID NO: 31449 - RNA, 20 nt, Artificial Sequence
  HTT spacer sequence TTCN PAM
auagccaccagcccagggua

SEQ ID NO: 31450 - RNA, 20 nt, Artificial Sequence
  HTT spacer sequence TTCN PAM
uuguuucuuuuuuugcuuaa

SEQ ID NO: 31451 - RNA, 20 nt, Artificial Sequence
  HTT spacer sequence TTCN PAM
uuuuuugcuuaagcuagucu

SEQ ID NO: 31452 - RNA, 20 nt, Artificial Sequence
  HTT spacer sequence TTCN PAM
ccaugcccaagugaaagcuu

SEQ ID NO: 31453 - RNA, 20 nt, Artificial Sequence
  HTT spacer sequence TTCN PAM
cuugggcauggggaaauuua

SEQ ID NO: 31454 - RNA, 20 nt, Artificial Sequence
  HTT spacer sequence TTCN PAM
cucagucaaagcuuucacuu

SEQ ID NO: 31455 - RNA, 20 nt, Artificial Sequence
  HTT spacer sequence TTCN PAM
auuaacauguugaacaucuc

SEQ ID NO: 31456 - RNA, 20 nt, Artificial Sequence
  HTT spacer sequence TTCN PAM
acauguuaauugaacaaguu

SEQ ID NO: 31457 - RNA, 20 nt, Artificial Sequence
  HTT spacer sequence TTCN PAM
cuuucuguuuauaagcaagc

SEQ ID NO: 31458 - RNA, 20 nt, Artificial Sequence
  HTT spacer sequence TTCN PAM
guuuauaagcaagcauguau

SEQ ID NO: 31459 - RNA, 20 nt, Artificial Sequence
  HTT spacer sequence TTCN PAM
auacauacaugcuugcuuau

SEQ ID NO: 31460 - RNA, 20 nt, Artificial Sequence
  HTT spacer sequence TTCN PAM
cuucaauacauacaugcuug

SEQ ID NO: 31461 - RNA, 20 nt, Artificial Sequence
  HTT spacer sequence TTCN PAM
aaguucucuucaauacauac

SEQ ID NO: 31462 - RNA, 20 nt, Artificial Sequence
  HTT spacer sequence TTCN PAM
uaauuucaaaguucucuuca

SEQ ID NO: 31463 - RNA, 20 nt, Artificial Sequence
  HTT spacer sequence TTCN PAM
ucuuaauuucaaaguucucu

SEQ ID NO: 31464 - RNA, 20 nt, Artificial Sequence
  HTT spacer sequence TTCN PAM
aguuuuaguguauaugcugc

SEQ ID NO: 31465 - RNA, 20 nt, Artificial Sequence
  HTT spacer sequence TTCN PAM
cuguaucauuccaguuuuag

SEQ ID NO: 31466 - RNA, 20 nt, Artificial Sequence
  HTT spacer sequence TTCN PAM
caaauuugugugucguccuu

SEQ ID NO: 31467 - RNA, 20 nt, Artificial Sequence
  HTT spacer sequence TTCN PAM
auacaaaaauauauuuaaaa

SEQ ID NO: 31468 - RNA, 20 nt, Artificial Sequence
  HTT spacer sequence TTCN PAM
uuuuuuaaauauauuuuugu

SEQ ID NO: 31469 - RNA, 20 nt, Artificial Sequence
  HTT spacer sequence TTCN PAM
uuccaugucauuuggcugcu

SEQ ID NO: 31470 - RNA, 20 nt, Artificial Sequence
  HTT spacer sequence TTCN PAM
augucauuuggcugcuuaaa

SEQ ID NO: 31471 - RNA, 20 nt, Artificial Sequence
  HTT spacer sequence TTCN PAM
agugauucucaugccucagc

SEQ ID NO: 31472 - RNA, 20 nt, Artificial Sequence
  HTT spacer sequence TTCN PAM
caugccucagcuucccggau

SEQ ID NO: 31473 - RNA, 20 nt, Artificial Sequence
  HTT spacer sequence TTCN PAM
cggauagcugggauuacagg

SEQ ID NO: 31474 - RNA, 20 nt, Artificial Sequence
  HTT spacer sequence TTCN PAM
ccauguugaccaggcugguc

SEQ ID NO: 31475 - RNA, 20 nt, Artificial Sequence
  HTT spacer sequence TTCN PAM
agaccagccuggucaacaug

SEQ ID NO: 31476 - RNA, 20 nt, Artificial Sequence
  HTT spacer sequence TTCN PAM
gucauccaugauauugugaa

SEQ ID NO: 31477 - RNA, 20 nt, Artificial Sequence
  HTT spacer sequence TTCN PAM
caauaucauggaugacugaa

SEQ ID NO: 31478 - RNA, 20 nt, Artificial Sequence
  HTT spacer sequence TTCN PAM
uucagucuccuggcauauau

SEQ ID NO: 31479 - RNA, 20 nt, Artificial Sequence
  HTT spacer sequence TTCN PAM
gucuccuggcauauauuucc

SEQ ID NO: 31480 - RNA, 20 nt, Artificial Sequence
  HTT spacer sequence TTCN PAM
ccaaauccuuggaaucuuca

SEQ ID NO: 31481 - RNA, 20 nt, Artificial Sequence
  HTT spacer sequence TTCN PAM
aaggauuuggggaaauauau

SEQ ID NO: 31482 - RNA, 20 nt, Artificial Sequence
  HTT spacer sequence TTCN PAM
aagugaugaaugucuuuuuu

SEQ ID NO: 31483 - RNA, 20 nt, Artificial Sequence
  HTT spacer sequence TTCN PAM
ucacuuugaagauuccaagg

SEQ ID NO: 31484 - RNA, 20 nt, Artificial Sequence
  HTT spacer sequence TTCN PAM
agauaggagguggggcuggu

SEQ ID NO: 31485 - RNA, 20 nt, Artificial Sequence
  HTT spacer sequence TTCN PAM
ggugaccagccccaccuccu

SEQ ID NO: 31486 - RNA, 20 nt, Artificial Sequence
  HTT spacer sequence TTCN PAM
uucuggugaccagccccacc

SEQ ID NO: 31487 - RNA, 20 nt, Artificial Sequence
  HTT spacer sequence TTCN PAM
ucuuucuggugaccagcccc

SEQ ID NO: 31488 - RNA, 20 nt, Artificial Sequence
  HTT spacer sequence TTCN PAM
aacccuaccuucuucuuucu

SEQ ID NO: 31489 - RNA, 20 nt, Artificial Sequence
  HTT spacer sequence TTCN PAM
cagagggcaagaguagggcu

SEQ ID NO: 31490 - RNA, 20 nt, Artificial Sequence
  HTT spacer sequence TTCN PAM
ucacauaggcaugauuuaau

SEQ ID NO: 31491 - RNA, 20 nt, Artificial Sequence
  HTT spacer sequence TTCN PAM
gagagcuuccggguaacgug

SEQ ID NO: 31492 - RNA, 20 nt, Artificial Sequence
  HTT spacer sequence TTCN PAM
ggguaacguggagguuucua

SEQ ID NO: 31493 - RNA, 20 nt, Artificial Sequence
  HTT spacer sequence TTCN PAM
agagggcagcgcaccucccu

SEQ ID NO: 31494 - RNA, 20 nt, Artificial Sequence
  HTT spacer sequence TTCN PAM
acggggacagaagcuccugu

SEQ ID NO: 31495 - RNA, 20 nt, Artificial Sequence
  HTT spacer sequence TTCN PAM
guccccguagaagggaggug

SEQ ID NO: 31496 - RNA, 20 nt, Artificial Sequence
  HTT spacer sequence TTCN PAM
agaacgcucccuaugcaucu

SEQ ID NO: 31497 - RNA, 20 nt, Artificial Sequence
  HTT spacer sequence TTCN PAM
ggaagggucccaagcacagg

SEQ ID NO: 31498 - RNA, 20 nt, Artificial Sequence
  HTT spacer sequence TTCN PAM
caucuggcuguucaucugua

SEQ ID NO: 31499 - RNA, 20 nt, Artificial Sequence
  HTT spacer sequence TTCN PAM
ucuguauccuguaaaauaug

SEQ ID NO: 31500 - RNA, 20 nt, Artificial Sequence
  HTT spacer sequence TTCN PAM
ugguuuauuacaaggcauau

SEQ ID NO: 31501 - RNA, 20 nt, Artificial Sequence
  HTT spacer sequence TTCN PAM
cugaguucuguaugcugauc

SEQ ID NO: 31502 - RNA, 20 nt, Artificial Sequence
  HTT spacer sequence TTCN PAM
guaugcugaucuagcaaauu

SEQ ID NO: 31503 - RNA, 20 nt, Artificial Sequence
  HTT spacer sequence TTCN PAM
auuaauuugcuagaucagca

SEQ ID NO: 31504 - RNA, 20 nt, Artificial Sequence
  HTT spacer sequence TTCN PAM
cacagcccccuccuuggguu

SEQ ID NO: 31505 - RNA, 20 nt, Artificial Sequence
  HTT spacer sequence TTCN PAM
gacugaccugcuaaacauug

SEQ ID NO: 31506 - RNA, 20 nt, Artificial Sequence
  HTT spacer sequence TTCN PAM
aaugccaacugcaagccccu

SEQ ID NO: 31507 - RNA, 20 nt, Artificial Sequence
  HTT spacer sequence TTCN PAM
gucuugugggaacugagucc

SEQ ID NO: 31508 - RNA, 20 nt, Artificial Sequence
  HTT spacer sequence TTCN PAM
cacaagacugaaccccguuu

SEQ ID NO: 31509 - RNA, 20 nt, Artificial Sequence
  HTT spacer sequence TTCN PAM
agucugacggcaucuaccug

SEQ ID NO: 31510 - RNA, 20 nt, Artificial Sequence
  HTT spacer sequence TTCN PAM
gcagcggacaccagcugggu

SEQ ID NO: 31511 - RNA, 20 nt, Artificial Sequence
  HTT spacer sequence TTCN PAM
ccccacccacaagcaagcaa

SEQ ID NO: 31512 - RNA, 20 nt, Artificial Sequence
  HTT spacer sequence TTCN PAM
guguugauucuugagugaga

SEQ ID NO: 31513 - RNA, 20 nt, Artificial Sequence
  HTT spacer sequence TTCN PAM
ugagugagagaacaggaaaa

SEQ ID NO: 31514 - RNA, 20 nt, Artificial Sequence
  HTT spacer sequence TTCN PAM
cucacucaagaaucaacaca

SEQ ID NO: 31515 - RNA, 20 nt, Artificial Sequence
  HTT spacer sequence TTCN PAM
uguucucucacucaagaauc

SEQ ID NO: 31516 - RNA, 20 nt, Artificial Sequence
  HTT spacer sequence TTCN PAM
ccuagauccucaggguggcu

SEQ ID NO: 31517 - RNA, 20 nt, Artificial Sequence
  HTT spacer sequence TTCN PAM
gccacccugaggaucuaggg

SEQ ID NO: 31518 - RNA, 20 nt, Artificial Sequence
  HTT spacer sequence TTCN PAM
auauguauauucagccaccc

SEQ ID NO: 31519 - RNA, 20 nt, Artificial Sequence
  HTT spacer sequence TTCN PAM
uaacuccuccuacagcguau

SEQ ID NO: 31520 - RNA, 20 nt, Artificial Sequence
  HTT spacer sequence TTCN PAM
ugccucuucaugggucacgu

SEQ ID NO: 31521 - RNA, 20 nt, Artificial Sequence
  HTT spacer sequence TTCN PAM
ugggucacguguucaaaaaa

SEQ ID NO: 31522 - RNA, 20 nt, Artificial Sequence
  HTT spacer sequence TTCN PAM
aaaaauguugggguuagcgu

SEQ ID NO: 31523 - RNA, 20 nt, Artificial Sequence
  HTT spacer sequence TTCN PAM
ucccucugacgucaaaaggu

SEQ ID NO: 31524 - RNA, 20 nt, Artificial Sequence
  HTT spacer sequence TTCN PAM
ccuuuugacgucagagggag

SEQ ID NO: 31525 - RNA, 20 nt, Artificial Sequence
  HTT spacer sequence TTCN PAM
cguguccucugcuucaccuu

SEQ ID NO: 31526 - RNA, 20 nt, Artificial Sequence
  HTT spacer sequence TTCN PAM
ugguaagagaccacagagcc

SEQ ID NO: 31527 - RNA, 20 nt, Artificial Sequence
  HTT spacer sequence TTCN PAM
cuuccugguaagagaccaca

SEQ ID NO: 31528 - RNA, 20 nt, Artificial Sequence
  HTT spacer sequence TTCN PAM
auugccuuuagccaaucauc

SEQ ID NO: 31529 - RNA, 20 nt, Artificial Sequence
  HTT spacer sequence TTCN PAM
uuuuuucuagagcugguuuc

SEQ ID NO: 31530 - RNA, 20 nt, Artificial Sequence
  HTT spacer sequence TTCN PAM
agagcugguuucuguuuauu

SEQ ID NO: 31531 - RNA, 20 nt, Artificial Sequence
  HTT spacer sequence TTCN PAM
guuuauucuuuaggaaggca

SEQ ID NO: 31532 - RNA, 20 nt, Artificial Sequence
  HTT spacer sequence TTCN PAM
uuaggaaggcauuccaguga

SEQ ID NO: 31533 - RNA, 20 nt, Artificial Sequence
  HTT spacer sequence TTCN PAM
uaaagaauaaacagaaacca

SEQ ID NO: 31534 - RNA, 20 nt, Artificial Sequence
  HTT spacer sequence TTCN PAM
agugaaaggguauuaaggaa

SEQ ID NO: 31535 - RNA, 20 nt, Artificial Sequence
  HTT spacer sequence TTCN PAM
cuggaaugccuuccuaaaga

SEQ ID NO: 31536 - RNA, 20 nt, Artificial Sequence
  HTT spacer sequence TTCN PAM
uuaauacccuuucacuggaa

SEQ ID NO: 31537 - RNA, 20 nt, Artificial Sequence
  HTT spacer sequence TTCN PAM
uggccgugacaggacagguc

SEQ ID NO: 31538 - RNA, 20 nt, Artificial Sequence
  HTT spacer sequence TTCN PAM
cugaggucuccucgaccaag

SEQ ID NO: 31539 - RNA, 20 nt, Artificial Sequence
  HTT spacer sequence TTCN PAM
uggucgaggagaccucagag

SEQ ID NO: 31540 - RNA, 20 nt, Artificial Sequence
  HTT spacer sequence TTCN PAM
uauguaccucaagggagcag

SEQ ID NO: 31541 - RNA, 20 nt, Artificial Sequence
  HTT spacer sequence TTCN PAM
aacacuguuuugagugcaua

SEQ ID NO: 31542 - RNA, 20 nt, Artificial Sequence
  HTT spacer sequence TTCN PAM
uuaaaauguucaaacacugu

SEQ ID NO: 31543 - RNA, 20 nt, Artificial Sequence
  HTT spacer sequence TTCN PAM
uuuaacagagguauauaaua

SEQ ID NO: 31544 - RNA, 20 nt, Artificial Sequence
  HTT spacer sequence TTCN PAM
gccaaauuaaauuuaaauga

SEQ ID NO: 31545 - RNA, 20 nt, Artificial Sequence
  HTT spacer sequence TTCN PAM
uugcucaauuaaacucauuu

SEQ ID NO: 31546 - RNA, 20 nt, Artificial Sequence
  HTT spacer sequence TTCN PAM
cgaauugggcagcccccaga

SEQ ID NO: 31547 - RNA, 20 nt, Artificial Sequence
  HTT spacer sequence TTCN PAM
ugaaucguucauugcucaau

SEQ ID NO: 31548 - RNA, 20 nt, Artificial Sequence
  HTT spacer sequence TTCN PAM
gggggcugcccaauucguga

SEQ ID NO: 31549 - RNA, 20 nt, Artificial Sequence
  HTT spacer sequence TTCN PAM
gagggacuccagggauaccu

SEQ ID NO: 31550 - RNA, 20 nt, Artificial Sequence
  HTT spacer sequence TTCN PAM
gaccacgagguaucccugga

SEQ ID NO: 31551 - RNA, 20 nt, Artificial Sequence
  HTT spacer sequence TTCN PAM
cuuuuuugucuauagauuug

SEQ ID NO: 31552 - RNA, 20 nt, Artificial Sequence
  HTT spacer sequence TTCN PAM
auaugucacuucccuuuuuu

SEQ ID NO: 31553 - RNA, 20 nt, Artificial Sequence
  HTT spacer sequence TTCN PAM
guacucaccuccaauuucua

SEQ ID NO: 31554 - RNA, 20 nt, Artificial Sequence
  HTT spacer sequence TTCN PAM
aacuguguccaaauaaggca

SEQ ID NO: 31555 - RNA, 20 nt, Artificial Sequence
  HTT spacer sequence TTCN PAM
cucguacacugcugagaguu

SEQ ID NO: 31556 - RNA, 20 nt, Artificial Sequence
  HTT spacer sequence TTCN PAM
gucuugucuaccaauuaagu

SEQ ID NO: 31557 - RNA, 20 nt, Artificial Sequence
  HTT spacer sequence TTCN PAM
uccacaaggacucaaauaga

SEQ ID NO: 31558 - RNA, 20 nt, Artificial Sequence
  HTT spacer sequence TTCN PAM
cuauuugaguccuuguggac

SEQ ID NO: 31559 - RNA, 20 nt, Artificial Sequence
  HTT spacer sequence TTCN PAM
caggccauauuuaguuugcu

SEQ ID NO: 31560 - RNA, 20 nt, Artificial Sequence
  HTT spacer sequence TTCN PAM
acccuuuuggucauuuucuc

SEQ ID NO: 31561 - RNA, 20 nt, Artificial Sequence
  HTT spacer sequence TTCN PAM
caauuuugagagauugacca

SEQ ID NO: 31562 - RNA, 20 nt, Artificial Sequence
  HTT spacer sequence TTCN PAM
ggaccaaauaaguacauuua

SEQ ID NO: 31563 - RNA, 20 nt, Artificial Sequence
  HTT spacer sequence TTCN PAM
cagaggguuucaggaccaaa

SEQ ID NO: 31564 - RNA, 20 nt, Artificial Sequence
  HTT spacer sequence TTCN PAM
acuguuucucagaggguuuc

SEQ ID NO: 31565 - RNA, 20 nt, Artificial Sequence
  HTT spacer sequence TTCN PAM
uaccuuugcaaaacucacug

SEQ ID NO: 31566 - RNA, 20 nt, Artificial Sequence
  HTT spacer sequence TTCN PAM
agcauaaggagguacccuca

SEQ ID NO: 31567 - RNA, 20 nt, Artificial Sequence
  HTT spacer sequence TTCN PAM
ccuauaaacaggacguucca

SEQ ID NO: 31568 - RNA, 20 nt, Artificial Sequence
  HTT spacer sequence TTCN PAM
uuaaagucuuaguuugauua

SEQ ID NO: 31569 - RNA, 20 nt, Artificial Sequence
  HTT spacer sequence TTCN PAM
ccuuucuguccagguucuca

SEQ ID NO: 31570 - RNA, 20 nt, Artificial Sequence
  HTT spacer sequence TTCN PAM
guccagguucucacuuaggu

SEQ ID NO: 31571 - RNA, 20 nt, Artificial Sequence
  HTT spacer sequence TTCN PAM
cacuuaggugagugugggcg

SEQ ID NO: 31572 - RNA, 20 nt, Artificial Sequence
  HTT spacer sequence TTCN PAM
aguauaauaaaaaauauaua

SEQ ID NO: 31573 - RNA, 20 nt, Artificial Sequence
  HTT spacer sequence TTCN PAM
auauauauauuuuuuauuau

SEQ ID NO: 31574 - RNA, 20 nt, Artificial Sequence
  HTT spacer sequence TTCN PAM
uauucuauauauauauuuuu

SEQ ID NO: 31575 - RNA, 20 nt, Artificial Sequence
  HTT spacer sequence TTCN PAM
ccguguuagccaggaugguc

SEQ ID NO: 31576 - RNA, 20 nt, Artificial Sequence
  HTT spacer sequence TTCN PAM
ccugccucagccucccgagu

SEQ ID NO: 31577 - RNA, 20 nt, Artificial Sequence
  HTT spacer sequence TTCN PAM
ugccauucuccugccucagc

SEQ ID NO: 31578 - RNA, 20 nt, Artificial Sequence
  HTT spacer sequence TTCN PAM
uuuuguuuuguuuuguuuug

SEQ ID NO: 31579 - RNA, 20 nt, Artificial Sequence
  HTT spacer sequence TTCN PAM
aguauaacuauucuuuuugu

SEQ ID NO: 31580 - RNA, 20 nt, Artificial Sequence
  HTT spacer sequence TTCN PAM
aauauuauaauaaucuuugu

SEQ ID NO: 31581 - RNA, 20 nt, Artificial Sequence
  HTT spacer sequence TTCN PAM
acaauuauaaccuaggaaaa

SEQ ID NO: 31582 - RNA, 20 nt, Artificial Sequence
  HTT spacer sequence TTCN PAM
uagguuauaauuguagaaca

SEQ ID NO: 31583 - RNA, 20 nt, Artificial Sequence
  HTT spacer sequence TTCN PAM
gcuccuaucucuguauggcc

SEQ ID NO: 31584 - RNA, 20 nt, Artificial Sequence
  HTT spacer sequence TTCN PAM
cacccugucccuucagcucc

SEQ ID NO: 31585 - RNA, 20 nt, Artificial Sequence
  HTT spacer sequence TTCN PAM
ggucacuucucacccugucc

SEQ ID NO: 31586 - RNA, 20 nt, Artificial Sequence
  HTT spacer sequence TTCN PAM
caggcacugucauuaccacu

SEQ ID NO: 31587 - RNA, 20 nt, Artificial Sequence
  HTT spacer sequence TTCN PAM
cuggucggcuaaguaacagg

SEQ ID NO: 31588 - RNA, 20 nt, Artificial Sequence
  HTT spacer sequence TTCN PAM
cuaaccccuccgccccucuc

SEQ ID NO: 31589 - RNA, 20 nt, Artificial Sequence
  HTT spacer sequence TTCN PAM
acaagagaugguggagcaga

SEQ ID NO: 31590 - RNA, 20 nt, Artificial Sequence
  HTT spacer sequence TTCN PAM
gcggucacgcuccuguuuca

SEQ ID NO: 31591 - RNA, 20 nt, Artificial Sequence
  HTT spacer sequence TTCN PAM
cuuucauguuccgcucugua

SEQ ID NO: 31592 - RNA, 20 nt, Artificial Sequence
  HTT spacer sequence TTCN PAM
uguuccgcucuguacaccug

SEQ ID NO: 31593 - RNA, 20 nt, Artificial Sequence
  HTT spacer sequence TTCN PAM
gcucuguacaccuggcucca

SEQ ID NO: 31594 - RNA, 20 nt, Artificial Sequence
  HTT spacer sequence TTCN PAM
agauagcaguagcagaauua

SEQ ID NO: 31595 - RNA, 20 nt, Artificial Sequence
  HTT spacer sequence TTCN PAM
gcuacugcuaucuagaagau

SEQ ID NO: 31596 - RNA, 20 nt, Artificial Sequence
  HTT spacer sequence TTCN PAM
cuaauucugcuacugcuauc

SEQ ID NO: 31597 - RNA, 20 nt, Artificial Sequence
  HTT spacer sequence TTCN PAM
aagacuuuagcacuuucacu

SEQ ID NO: 31598 - RNA, 20 nt, Artificial Sequence
  HTT spacer sequence TTCN PAM
augcauuucaaagacuuuag

SEQ ID NO: 31599 - RNA, 20 nt, Artificial Sequence
  HTT spacer sequence TTCN PAM
ucuaugcauuucaaagacuu

SEQ ID NO: 31600 - RNA, 20 nt, Artificial Sequence
  HTT spacer sequence TTCN PAM
cuguuugguagccgaggcgg

SEQ ID NO: 31601 - RNA, 20 nt, Artificial Sequence
  HTT spacer sequence TTCN PAM
gggccacuaccagucuccgu

SEQ ID NO: 31602 - RNA, 20 nt, Artificial Sequence
  HTT spacer sequence TTCN PAM
ucuaucucuuugucuugugu

SEQ ID NO: 31603 - RNA, 20 nt, Artificial Sequence
  HTT spacer sequence TTCN PAM
aucucuuugucuuguguccu

SEQ ID NO: 31604 - RNA, 20 nt, Artificial Sequence
  HTT spacer sequence TTCN PAM
gugaucucucaucuccgcag

SEQ ID NO: 31605 - RNA, 20 nt, Artificial Sequence
  HTT spacer sequence TTCN PAM
ccucaccugcggagaugaga

SEQ ID NO: 31606 - RNA, 20 nt, Artificial Sequence
  HTT spacer sequence TTCN PAM
ggucucagcacgucauucau

SEQ ID NO: 31607 - RNA, 20 nt, Artificial Sequence
  HTT spacer sequence TTCN PAM
uagguuacgguguccucaug

SEQ ID NO: 31608 - RNA, 20 nt, Artificial Sequence
  HTT spacer sequence TTCN PAM
uucagcuucugccauuccag

SEQ ID NO: 31609 - RNA, 20 nt, Artificial Sequence
  HTT spacer sequence TTCN PAM
gcuucugccauuccaguuga

SEQ ID NO: 31610 - RNA, 20 nt, Artificial Sequence
  HTT spacer sequence TTCN PAM
gccauuccaguugaagagag

SEQ ID NO: 31611 - RNA, 20 nt, Artificial Sequence
  HTT spacer sequence TTCN PAM
aguugaagagagaccauuug

SEQ ID NO: 31612 - RNA, 20 nt, Artificial Sequence
  HTT spacer sequence TTCN PAM
acuggaauggcagaagcuga

SEQ ID NO: 31613 - RNA, 20 nt, Artificial Sequence
  HTT spacer sequence TTCN PAM
agagauggcugcaugcagac

SEQ ID NO: 31614 - RNA, 20 nt, Artificial Sequence
  HTT spacer sequence TTCN PAM
cucaaagguuuuaaaugucu

SEQ ID NO: 31615 - RNA, 20 nt, Artificial Sequence
  HTT spacer sequence TTCN PAM
uuaaucucccacaacugaau

SEQ ID NO: 31616 - RNA, 20 nt, Artificial Sequence
  HTT spacer sequence TTCN PAM
guugugggagauuaaugaaa

SEQ ID NO: 31617 - RNA, 20 nt, Artificial Sequence
  HTT spacer sequence TTCN PAM
cccuaggccacaggugccag

SEQ ID NO: 31618 - RNA, 20 nt, Artificial Sequence
  HTT spacer sequence TTCN PAM
guuuagucaauucuauuauu

SEQ ID NO: 31619 - RNA, 20 nt, Artificial Sequence
  HTT spacer sequence TTCN PAM
auuauuuagcauaccuuuca

SEQ ID NO: 31620 - RNA, 20 nt, Artificial Sequence
  HTT spacer sequence TTCN PAM
caagggaauugaaagucugu

SEQ ID NO: 31621 - RNA, 20 nt, Artificial Sequence
  HTT spacer sequence TTCN PAM
cuugugaaagguaugcuaaa

SEQ ID NO: 31622 - RNA, 20 nt, Artificial Sequence
  HTT spacer sequence TTCN PAM
auucccuugugaaagguaug

SEQ ID NO: 31623 - RNA, 20 nt, Artificial Sequence
  HTT spacer sequence TTCN PAM
gguuauggccucuuuuacuc

SEQ ID NO: 31624 - RNA, 20 nt, Artificial Sequence
  HTT spacer sequence TTCN PAM
augguuuagaguaaaagagg

SEQ ID NO: 31625 - RNA, 20 nt, Artificial Sequence
  HTT spacer sequence TTCN PAM
ggaagaguaaagcccuccug

SEQ ID NO: 31626 - RNA, 20 nt, Artificial Sequence
  HTT spacer sequence TTCN PAM
agaagggcaucacuuuucca

SEQ ID NO: 31627 - RNA, 20 nt, Artificial Sequence
  HTT spacer sequence TTCN PAM
cuccucuuaacccacacuau

SEQ ID NO: 31628 - RNA, 20 nt, Artificial Sequence
  HTT spacer sequence TTCN PAM
guuucugacugauuacaggc

SEQ ID NO: 31629 - RNA, 20 nt, Artificial Sequence
  HTT spacer sequence TTCN PAM
gacugauuacaggcaacaua

SEQ ID NO: 31630 - RNA, 20 nt, Artificial Sequence
  HTT spacer sequence TTCN PAM
caccuacacuggaccuucau

SEQ ID NO: 31631 - RNA, 20 nt, Artificial Sequence
  HTT spacer sequence TTCN PAM
ucuuuuaucuaucaaaguau

SEQ ID NO: 31632 - RNA, 20 nt, Artificial Sequence
  HTT spacer sequence TTCN PAM
caaaugaaaguauaccccau

SEQ ID NO: 31633 - RNA, 20 nt, Artificial Sequence
  HTT spacer sequence TTCN PAM
uuugugaaggauuuugcagc

SEQ ID NO: 31634 - RNA, 20 nt, Artificial Sequence
  HTT spacer sequence TTCN PAM
uuucuauuauucauagaggc

SEQ ID NO: 31635 - RNA, 20 nt, Artificial Sequence
  HTT spacer sequence TTCN PAM
auuauucauagaggcauaag

SEQ ID NO: 31636 - RNA, 20 nt, Artificial Sequence
  HTT spacer sequence TTCN PAM
uagaggcauaagcaaggaac

SEQ ID NO: 31637 - RNA, 20 nt, Artificial Sequence
  HTT spacer sequence TTCN PAM
uugcuuaugccucuaugaau

SEQ ID NO: 31638 - RNA, 20 nt, Artificial Sequence
  HTT spacer sequence TTCN PAM
aaccucaggugauccgccca

SEQ ID NO: 31639 - RNA, 20 nt, Artificial Sequence
  HTT spacer sequence TTCN PAM
aaaccagccuggccaacuug

SEQ ID NO: 31640 - RNA, 20 nt, Artificial Sequence
  HTT spacer sequence TTCN PAM
gaguagcugguauuacaggu

SEQ ID NO: 31641 - RNA, 20 nt, Artificial Sequence
  HTT spacer sequence TTCN PAM
cauaccucagccuuccgagu

SEQ ID NO: 31642 - RNA, 20 nt, Artificial Sequence
  HTT spacer sequence TTCN PAM
agcgauucucauaccucagc

SEQ ID NO: 31643 - RNA, 20 nt, Artificial Sequence
  HTT spacer sequence TTCN PAM
uuuuuggagauggagucuug

SEQ ID NO: 31644 - RNA, 20 nt, Artificial Sequence
  HTT spacer sequence TTCN PAM
acugucaugagacucucuuu

SEQ ID NO: 31645 - RNA, 20 nt, Artificial Sequence
  HTT spacer sequence TTCN PAM
caucaaggaugccaucuucu

SEQ ID NO: 31646 - RNA, 20 nt, Artificial Sequence
  HTT spacer sequence TTCN PAM
ggggagagacuuccuuggcu

SEQ ID NO: 31647 - RNA, 20 nt, Artificial Sequence
  HTT spacer sequence TTCN PAM
uuggcuuuaccuuaaagguu

SEQ ID NO: 31648 - RNA, 20 nt, Artificial Sequence
  HTT spacer sequence TTCN PAM
aauggguguacaguuccagg

SEQ ID NO: 31649 - RNA, 20 nt, Artificial Sequence
  HTT spacer sequence TTCN PAM
aggaguguggauggacccuu

SEQ ID NO: 31650 - RNA, 20 nt, Artificial Sequence
  HTT spacer sequence TTCN PAM
caguugugagauuaugaacc

SEQ ID NO: 31651 - RNA, 20 nt, Artificial Sequence
  HTT spacer sequence TTCN PAM
uaaucucacaacugagaagg

SEQ ID NO: 31652 - RNA, 20 nt, Artificial Sequence
  HTT spacer sequence TTCN PAM
agaucccuaaguuuuguugc

SEQ ID NO: 31653 - RNA, 20 nt, Artificial Sequence
  HTT spacer sequence TTCN PAM
cugauguucucagaagaucc

SEQ ID NO: 31654 - RNA, 20 nt, Artificial Sequence
  HTT spacer sequence TTCN PAM
cagaagauccagucuucggg

SEQ ID NO: 31655 - RNA, 20 nt, Artificial Sequence
  HTT spacer sequence TTCN PAM
gagaacaucagagaaagacu

SEQ ID NO: 31656 - RNA, 20 nt, Artificial Sequence
  HTT spacer sequence TTCN PAM
gguucuagaaugcaaagggu

SEQ ID NO: 31657 - RNA, 20 nt, Artificial Sequence
  HTT spacer sequence TTCN PAM
agaaugcaaaggguuugacc

SEQ ID NO: 31658 - RNA, 20 nt, Artificial Sequence
  HTT spacer sequence TTCN PAM
agaacccgaagacuggaucu

SEQ ID NO: 31659 - RNA, 20 nt, Artificial Sequence
  HTT spacer sequence TTCN PAM
cugaggucaaacccuuugca

SEQ ID NO: 31660 - RNA, 20 nt, Artificial Sequence
  HTT spacer sequence TTCN PAM
augguucacugaggucaaac

SEQ ID NO: 31661 - RNA, 20 nt, Artificial Sequence
  HTT spacer sequence TTCN PAM
ggguuguauaaaagcucucg

SEQ ID NO: 31662 - RNA, 20 nt, Artificial Sequence
  HTT spacer sequence TTCN PAM
augcauguuuuccggguugu

SEQ ID NO: 31663 - RNA, 20 nt, Artificial Sequence
  HTT spacer sequence TTCN PAM
aucgucauuuucaaugcaug

SEQ ID NO: 31664 - RNA, 20 nt, Artificial Sequence
  HTT spacer sequence TTCN PAM
aucucaaaaaaaaaaaagug

SEQ ID NO: 31665 - RNA, 20 nt, Artificial Sequence
  HTT spacer sequence TTCN PAM
augaugagucacgaaaugca

SEQ ID NO: 31666 - RNA, 20 nt, Artificial Sequence
  HTT spacer sequence TTCN PAM
ugacucaucauggaaaagau

SEQ ID NO: 31667 - RNA, 20 nt, Artificial Sequence
  HTT spacer sequence TTCN PAM
gcauuucgugacucaucaug

SEQ ID NO: 31668 - RNA, 20 nt, Artificial Sequence
  HTT spacer sequence TTCN PAM
ugaguccuuaaagcuuuugu

SEQ ID NO: 31669 - RNA, 20 nt, Artificial Sequence
  HTT spacer sequence TTCN PAM
ccgugaguccauacuuaauu

SEQ ID NO: 31670 - RNA, 20 nt, Artificial Sequence
  HTT spacer sequence TTCN PAM
guccucuugaaucccaguug

SEQ ID NO: 31671 - RNA, 20 nt, Artificial Sequence
  HTT spacer sequence TTCN PAM
agaggacugaagucuaaugu

SEQ ID NO: 31672 - RNA, 20 nt, Artificial Sequence
  HTT spacer sequence TTCN PAM
ccaaauuaggugcauugcac

SEQ ID NO: 31673 - RNA, 20 nt, Artificial Sequence
  HTT spacer sequence TTCN PAM
uucaaauuguauaucugaac

SEQ ID NO: 31674 - RNA, 20 nt, Artificial Sequence
  HTT spacer sequence TTCN PAM
aauuguauaucugaacuauu

SEQ ID NO: 31675 - RNA, 20 nt, Artificial Sequence
  HTT spacer sequence TTCN PAM
gauauacaauuugaaugaaa

SEQ ID NO: 31676 - RNA, 20 nt, Artificial Sequence
  HTT spacer sequence TTCN PAM
gugucagcugauuuaagaug

SEQ ID NO: 31677 - RNA, 20 nt, Artificial Sequence
  HTT spacer sequence TTCN PAM
ucuuaaaucagcugacacug

SEQ ID NO: 31678 - RNA, 20 nt, Artificial Sequence
  HTT spacer sequence TTCN PAM
ugguauucaauuaauuuuug

SEQ ID NO: 31679 - RNA, 20 nt, Artificial Sequence
  HTT spacer sequence TTCN PAM
auuaauuuuuguucuacuug

SEQ ID NO: 31680 - RNA, 20 nt, Artificial Sequence
  HTT spacer sequence TTCN PAM
acuuggguuagcaguucuau

SEQ ID NO: 31681 - RNA, 20 nt, Artificial Sequence
  HTT spacer sequence TTCN PAM
auaagccagucagucuuuuc

SEQ ID NO: 31682 - RNA, 20 nt, Artificial Sequence
  HTT spacer sequence TTCN PAM
uuaaaguuccaggaauucuu

SEQ ID NO: 31683 - RNA, 20 nt, Artificial Sequence
  HTT spacer sequence TTCN PAM
aggaauucuuacccaguuca

SEQ ID NO: 31684 - RNA, 20 nt, Artificial Sequence
  HTT spacer sequence TTCN PAM
uggaacuuuaaugaaaagac

SEQ ID NO: 31685 - RNA, 20 nt, Artificial Sequence
  HTT spacer sequence TTCN PAM
uacccaguucaaaugauaug

SEQ ID NO: 31686 - RNA, 20 nt, Artificial Sequence
  HTT spacer sequence TTCN PAM
aaugauaugauucuaaaguu

SEQ ID NO: 31687 - RNA, 20 nt, Artificial Sequence
  HTT spacer sequence TTCN PAM
aaaguuauuagaaaccugua

SEQ ID NO: 31688 - RNA, 20 nt, Artificial Sequence
  HTT spacer sequence TTCN PAM
aauaacuuuagaaucauauc

SEQ ID NO: 31689 - RNA, 20 nt, Artificial Sequence
  HTT spacer sequence TTCN PAM
aagacugauuuuuagggucc

SEQ ID NO: 31690 - RNA, 20 nt, Artificial Sequence
  HTT spacer sequence TTCN PAM
uccuuuuaugaaucuccuaa

SEQ ID NO: 31691 - RNA, 20 nt, Artificial Sequence
  HTT spacer sequence TTCN PAM
uaaaaggaugaaaaggaccc

SEQ ID NO: 31692 - RNA, 20 nt, Artificial Sequence
  HTT spacer sequence TTCN PAM
aaaguauggugucuuuuagg

SEQ ID NO: 31693 - RNA, 20 nt, Artificial Sequence
  HTT spacer sequence TTCN PAM
gaaaccgcaccagcauuaag

SEQ ID NO: 31694 - RNA, 20 nt, Artificial Sequence
  HTT spacer sequence TTCN PAM
gaaaacuucaaaaguauggu

SEQ ID NO: 31695 - RNA, 20 nt, Artificial Sequence
  HTT spacer sequence TTCN PAM
acaguuaauugcuuaaugcu

SEQ ID NO: 31696 - RNA, 20 nt, Artificial Sequence
  HTT spacer sequence TTCN PAM
uugucaauuguguuuuuaac

SEQ ID NO: 31697 - RNA, 20 nt, Artificial Sequence
  HTT spacer sequence TTCN PAM
augauuuacaguaacuuaac

SEQ ID NO: 31698 - RNA, 20 nt, Artificial Sequence
  HTT spacer sequence TTCN PAM
aauaugccugagucuaugcu

SEQ ID NO: 31699 - RNA, 20 nt, Artificial Sequence
  HTT spacer sequence TTCN PAM
aaaauucuaauaugccugag

SEQ ID NO: 31700 - RNA, 20 nt, Artificial Sequence
  HTT spacer sequence TTCN PAM
aaaauuaaaugggauuucua

SEQ ID NO: 31701 - RNA, 20 nt, Artificial Sequence
  HTT spacer sequence TTCN PAM
cuaaaauguaaccugaagag

SEQ ID NO: 31702 - RNA, 20 nt, Artificial Sequence
  HTT spacer sequence TTCN PAM
gguuacauuuuagugaauga

SEQ ID NO: 31703 - RNA, 20 nt, Artificial Sequence
  HTT spacer sequence TTCN PAM
cauguaacuuaacauaucag

SEQ ID NO: 31704 - RNA, 20 nt, Artificial Sequence
  HTT spacer sequence TTCN PAM
gaccucuaacuuuggggugu

SEQ ID NO: 31705 - RNA, 20 nt, Artificial Sequence
  HTT spacer sequence TTCN PAM
aaauagucuuucugaccucu

SEQ ID NO: 31706 - RNA, 20 nt, Artificial Sequence
  HTT spacer sequence TTCN PAM
gcuucaaaauagucuuucug

SEQ ID NO: 31707 - RNA, 20 nt, Artificial Sequence
  HTT spacer sequence TTCN PAM
caaaaucaaauuucagcuuc

SEQ ID NO: 31708 - RNA, 20 nt, Artificial Sequence
  HTT spacer sequence TTCN PAM
uauaaaccuuuuauaauccc

SEQ ID NO: 31709 - RNA, 20 nt, Artificial Sequence
  HTT spacer sequence TTCN PAM
uucuuguugcccaggcugga

SEQ ID NO: 31710 - RNA, 20 nt, Artificial Sequence
  HTT spacer sequence TTCN PAM
uguugcccaggcuggaguac

SEQ ID NO: 31711 - RNA, 20 nt, Artificial Sequence
  HTT spacer sequence TTCN PAM
aguaauucuccugccucagc

SEQ ID NO: 31712 - RNA, 20 nt, Artificial Sequence
  HTT spacer sequence TTCN PAM
ccugccucagccucucuagu

SEQ ID NO: 31713 - RNA, 20 nt, Artificial Sequence
  HTT spacer sequence TTCN PAM
ccacguuggucaggcugguc

SEQ ID NO: 31714 - RNA, 20 nt, Artificial Sequence
  HTT spacer sequence TTCN PAM
agaccagccugaccaacgug

SEQ ID NO: 31715 - RNA, 20 nt, Artificial Sequence
  HTT spacer sequence TTCN PAM
augaaacaaaaaaagaucau

SEQ ID NO: 31716 - RNA, 20 nt, Artificial Sequence
  HTT spacer sequence TTCN PAM
uugaaccacaggcaaaagcc

SEQ ID NO: 31717 - RNA, 20 nt, Artificial Sequence
  HTT spacer sequence TTCN PAM
uuuaugauguggcuuggccc

SEQ ID NO: 31718 - RNA, 20 nt, Artificial Sequence
  HTT spacer sequence TTCN PAM
cugaguagcccuagugaccc

SEQ ID NO: 31719 - RNA, 20 nt, Artificial Sequence
  HTT spacer sequence TTCN PAM
cuuucccugaguagcccuag

SEQ ID NO: 31720 - RNA, 20 nt, Artificial Sequence
  HTT spacer sequence TTCN PAM
ggauucccuuucccugagua

SEQ ID NO: 31721 - RNA, 20 nt, Artificial Sequence
  HTT spacer sequence TTCN PAM
uacccuuuugcugugugcca

SEQ ID NO: 31722 - RNA, 20 nt, Artificial Sequence
  HTT spacer sequence TTCN PAM
uaccagucagauuucugacc

SEQ ID NO: 31723 - RNA, 20 nt, Artificial Sequence
  HTT spacer sequence TTCN PAM
gaccucucucucucugugug

SEQ ID NO: 31724 - RNA, 20 nt, Artificial Sequence
  HTT spacer sequence TTCN PAM
aacugguugaaugaauuaaa

SEQ ID NO: 31725 - RNA, 20 nt, Artificial Sequence
  HTT spacer sequence TTCN PAM
accaguuugaacacacagag

SEQ ID NO: 31726 - RNA, 20 nt, Artificial Sequence
  HTT spacer sequence TTCN PAM
uucaaccaguuugaacacac

SEQ ID NO: 31727 - RNA, 20 nt, Artificial Sequence
  HTT spacer sequence TTCN PAM
auuaaucaaaacuuuacaga

SEQ ID NO: 31728 - RNA, 20 nt, Artificial Sequence
  HTT spacer sequence TTCN PAM
cuacagccugagauuagccu

SEQ ID NO: 31729 - RNA, 20 nt, Artificial Sequence
  HTT spacer sequence TTCN PAM
cgugcuguucugugauaaaa

SEQ ID NO: 31730 - RNA, 20 nt, Artificial Sequence
  HTT spacer sequence TTCN PAM
gugauaaaaaggggcgccuu

SEQ ID NO: 31731 - RNA, 20 nt, Artificial Sequence
  HTT spacer sequence TTCN PAM
auccuaaggcgccccuuuuu

SEQ ID NO: 31732 - RNA, 20 nt, Artificial Sequence
  HTT spacer sequence TTCN PAM
gggaucugcagcaguuacug

SEQ ID NO: 31733 - RNA, 20 nt, Artificial Sequence
  HTT spacer sequence TTCN PAM
aaguggaacaggaauuuugg

SEQ ID NO: 31734 - RNA, 20 nt, Artificial Sequence
  HTT spacer sequence TTCN PAM
acuuggaagguggagaccaa

SEQ ID NO: 31735 - RNA, 20 nt, Artificial Sequence
  HTT spacer sequence TTCN PAM
uguuccacuuggaaggugga

SEQ ID NO: 31736 - RNA, 20 nt, Artificial Sequence
  HTT spacer sequence TTCN PAM
ugucauaguuagcucuacaa

SEQ ID NO: 31737 - RNA, 20 nt, Artificial Sequence
  HTT spacer sequence TTCN PAM
gcuggcaaagccucguaacu

SEQ ID NO: 31738 - RNA, 20 nt, Artificial Sequence
  HTT spacer sequence TTCN PAM
gggaagggcaauggagacug

SEQ ID NO: 31739 - RNA, 20 nt, Artificial Sequence
  HTT spacer sequence TTCN PAM
cagaaagagucuagaguagu

SEQ ID NO: 31740 - RNA, 20 nt, Artificial Sequence
  HTT spacer sequence TTCN PAM
guggugaucuggguuugauu

SEQ ID NO: 31741 - RNA, 20 nt, Artificial Sequence
  HTT spacer sequence TTCN PAM
uggcuuagggaaugaguacu

SEQ ID NO: 31742 - RNA, 20 nt, Artificial Sequence
  HTT spacer sequence TTCN PAM
cuaagccaggaaucaaaccc

SEQ ID NO: 31743 - RNA, 20 nt, Artificial Sequence
  HTT spacer sequence TTCN PAM
aauugauauuuggguaaccu

SEQ ID NO: 31744 - RNA, 20 nt, Artificial Sequence
  HTT spacer sequence TTCN PAM
cccccuccacaaacugucuu

SEQ ID NO: 31745 - RNA, 20 nt, Artificial Sequence
  HTT spacer sequence TTCN PAM
agacaguuuguggaggggga

SEQ ID NO: 31746 - RNA, 20 nt, Artificial Sequence
  HTT spacer sequence TTCN PAM
cagagcaccugggagguuac

SEQ ID NO: 31747 - RNA, 20 nt, Artificial Sequence
  HTT spacer sequence TTCN PAM
auaguuuaaaggcaggaaua

SEQ ID NO: 31748 - RNA, 20 nt, Artificial Sequence
  HTT spacer sequence TTCN PAM
ugccuuuaaacuauugaaag

SEQ ID NO: 31749 - RNA, 20 nt, Artificial Sequence
  HTT spacer sequence TTCN PAM
ucaggccaaacagccaauau

SEQ ID NO: 31750 - RNA, 20 nt, Artificial Sequence
  HTT spacer sequence TTCN PAM
uuuaaauugcuuauuaccca

SEQ ID NO: 31751 - RNA, 20 nt, Artificial Sequence
  HTT spacer sequence TTCN PAM
ggcucuaacagccugggacu

SEQ ID NO: 31752 - RNA, 20 nt, Artificial Sequence
  HTT spacer sequence TTCN PAM
caaggagucccaggcuguua

SEQ ID NO: 31753 - RNA, 20 nt, Artificial Sequence
  HTT spacer sequence TTCN PAM
caaaacggggucucuggcac

SEQ ID NO: 31754 - RNA, 20 nt, Artificial Sequence
  HTT spacer sequence TTCN PAM
ugaguaaaacagaguuuuuu

SEQ ID NO: 31755 - RNA, 20 nt, Artificial Sequence
  HTT spacer sequence TTCN PAM
gggguuucaugaguaaaaca

SEQ ID NO: 31756 - RNA, 20 nt, Artificial Sequence
  HTT spacer sequence TTCN PAM
aauuucugggguuucaugag

SEQ ID NO: 31757 - RNA, 20 nt, Artificial Sequence
  HTT spacer sequence TTCN PAM
uuucaaaaucuaaggcucug

SEQ ID NO: 31758 - RNA, 20 nt, Artificial Sequence
  HTT spacer sequence TTCN PAM
aaaucuaaggcucuguucug

SEQ ID NO: 31759 - RNA, 20 nt, Artificial Sequence
  HTT spacer sequence TTCN PAM
guuuugcauuggauuaucua

SEQ ID NO: 31760 - RNA, 20 nt, Artificial Sequence
  HTT spacer sequence TTCN PAM
gauacccccaaguaaaaaac

SEQ ID NO: 31761 - RNA, 20 nt, Artificial Sequence
  HTT spacer sequence TTCN PAM
cauagagacuugguguguaa

SEQ ID NO: 31762 - RNA, 20 nt, Artificial Sequence
  HTT spacer sequence TTCN PAM
ugccuaguuauuacacacca

SEQ ID NO: 31763 - RNA, 20 nt, Artificial Sequence
  HTT spacer sequence TTCN PAM
agaccagccugggcaacaug

SEQ ID NO: 31764 - RNA, 20 nt, Artificial Sequence
  HTT spacer sequence TTCN PAM
ccauguugcccaggcugguc

SEQ ID NO: 31765 - RNA, 20 nt, Artificial Sequence
  HTT spacer sequence TTCN PAM
gccucagccucccaaauagc

SEQ ID NO: 31766 - RNA, 20 nt, Artificial Sequence
  HTT spacer sequence TTCN PAM
ucugccucagccucccaaau

SEQ ID NO: 31767 - RNA, 20 nt, Artificial Sequence
  HTT spacer sequence TTCN PAM
cugcaaccuccgccuccugg

SEQ ID NO: 31768 - RNA, 20 nt, Artificial Sequence
  HTT spacer sequence TTCN PAM
agcugugccugcuuauuaua

SEQ ID NO: 31769 - RNA, 20 nt, Artificial Sequence
  HTT spacer sequence TTCN PAM
agggccuaauauaauaagca

SEQ ID NO: 31770 - RNA, 20 nt, Artificial Sequence
  HTT spacer sequence TTCN PAM
ugguccuguucuuccaagga

SEQ ID NO: 31771 - RNA, 20 nt, Artificial Sequence
  HTT spacer sequence TTCN PAM
uccaaggacuccauccuaaa

SEQ ID NO: 31772 - RNA, 20 nt, Artificial Sequence
  HTT spacer sequence TTCN PAM
aaggacuccauccuaaagcc

SEQ ID NO: 31773 - RNA, 20 nt, Artificial Sequence
  HTT spacer sequence TTCN PAM
aaauuggauuacuggcuuua

SEQ ID NO: 31774 - RNA, 20 nt, Artificial Sequence
  HTT spacer sequence TTCN PAM
aaguuucuaaauuggauuac

SEQ ID NO: 31775 - RNA, 20 nt, Artificial Sequence
  HTT spacer sequence TTCN PAM
uuuaccacuuucuaaguuuc

SEQ ID NO: 31776 - RNA, 20 nt, Artificial Sequence
  HTT spacer sequence TTCN PAM
ucugucugucuguguaguua

SEQ ID NO: 31777 - RNA, 20 nt, Artificial Sequence
  HTT spacer sequence TTCN PAM
gucugucuguguaguuauau

SEQ ID NO: 31778 - RNA, 20 nt, Artificial Sequence
  HTT spacer sequence TTCN PAM
agaccagccuggccaaccag

SEQ ID NO: 31779 - RNA, 20 nt, Artificial Sequence
  HTT spacer sequence TTCN PAM
ccugguuggccaggcugguc

SEQ ID NO: 31780 - RNA, 20 nt, Artificial Sequence
  HTT spacer sequence TTCN PAM
ccugccucagccuccugagu

SEQ ID NO: 31781 - RNA, 20 nt, Artificial Sequence
  HTT spacer sequence TTCN PAM
agugauucuccugccucagc

SEQ ID NO: 31782 - RNA, 20 nt, Artificial Sequence
  HTT spacer sequence TTCN PAM
uaaagccaauuaauuagagc

SEQ ID NO: 31783 - RNA, 20 nt, Artificial Sequence
  HTT spacer sequence TTCN PAM
aaauauuugauuuaagcacu

SEQ ID NO: 31784 - RNA, 20 nt, Artificial Sequence
  HTT spacer sequence TTCN PAM
uucaaaauauuugauuuaag

SEQ ID NO: 31785 - RNA, 20 nt, Artificial Sequence
  HTT spacer sequence TTCN PAM
guaaucuuugggaaauaaaa

SEQ ID NO: 31786 - RNA, 20 nt, Artificial Sequence
  HTT spacer sequence TTCN PAM
caaagauuacugaaguuaca

SEQ ID NO: 31787 - RNA, 20 nt, Artificial Sequence
  HTT spacer sequence TTCN PAM
ccaguaaccuuuaaaacuuu

SEQ ID NO: 31788 - RNA, 20 nt, Artificial Sequence
  HTT spacer sequence TTCN PAM
uuuuuuuuuuuuuuuuugag

SEQ ID NO: 31789 - RNA, 20 nt, Artificial Sequence
  HTT spacer sequence TTCN PAM
cucuuguugcccaggcugga

SEQ ID NO: 31790 - RNA, 20 nt, Artificial Sequence
  HTT spacer sequence TTCN PAM
agcaauucuccugccucagc

SEQ ID NO: 31791 - RNA, 20 nt, Artificial Sequence
  HTT spacer sequence TTCN PAM
ccugccucagccucccgagu

SEQ ID NO: 31792 - RNA, 20 nt, Artificial Sequence
  HTT spacer sequence TTCN PAM
ccauguuggccaggcugguc

SEQ ID NO: 31793 - RNA, 20 nt, Artificial Sequence
  HTT spacer sequence TTCN PAM
agaccagccuggccaacaug

SEQ ID NO: 31794 - RNA, 20 nt, Artificial Sequence
  HTT spacer sequence TTCN PAM
aaauuguucaaauuauuuug

SEQ ID NO: 31795 - RNA, 20 nt, Artificial Sequence
  HTT spacer sequence TTCN PAM
aauuauuuuggagcauuaga

SEQ ID NO: 31796 - RNA, 20 nt, Artificial Sequence
  HTT spacer sequence TTCN PAM
agauaaggccugcggacaug

SEQ ID NO: 31797 - RNA, 20 nt, Artificial Sequence
  HTT spacer sequence TTCN PAM
acauguccgcaggccuuauc

SEQ ID NO: 31798 - RNA, 20 nt, Artificial Sequence
  HTT spacer sequence TTCN PAM
uugccuagcugggggcaugg

SEQ ID NO: 31799 - RNA, 20 nt, Artificial Sequence
  HTT spacer sequence TTCN PAM
uuguaaucuucuuugccuag

SEQ ID NO: 31800 - RNA, 20 nt, Artificial Sequence
  HTT spacer sequence TTCN PAM
uauauaaaauuuauuuucuu

SEQ ID NO: 31801 - RNA, 20 nt, Artificial Sequence
  HTT spacer sequence TTCN PAM
ugcccuaaaguaaaauaacu

SEQ ID NO: 31802 - RNA, 20 nt, Artificial Sequence
  HTT spacer sequence TTCN PAM
cacuuguccuaaacacuccu

SEQ ID NO: 31803 - RNA, 20 nt, Artificial Sequence
  HTT spacer sequence TTCN PAM
caaauccuuuaacaacuuac

SEQ ID NO: 31804 - RNA, 20 nt, Artificial Sequence
  HTT spacer sequence TTCN PAM
ugcaccaaaaguaaaagaug

SEQ ID NO: 31805 - RNA, 20 nt, Artificial Sequence
  HTT spacer sequence TTCN PAM
auuacauguuauaaugguaa

SEQ ID NO: 31806 - RNA, 20 nt, Artificial Sequence
  HTT spacer sequence TTCN PAM
cucuccucacacaccuugca

SEQ ID NO: 31807 - RNA, 20 nt, Artificial Sequence
  HTT spacer sequence TTCN PAM
uauaaucuuuuaccaaaaac

SEQ ID NO: 31808 - RNA, 20 nt, Artificial Sequence
  HTT spacer sequence TTCN PAM
caugccuucuuauaaucuuu

SEQ ID NO: 31809 - RNA, 20 nt, Artificial Sequence
  HTT spacer sequence TTCN PAM
uuuacaagauuaauuuuuac

SEQ ID NO: 31810 - RNA, 20 nt, Artificial Sequence
  HTT spacer sequence TTCN PAM
gugugugaacauauugacua

SEQ ID NO: 31811 - RNA, 20 nt, Artificial Sequence
  HTT spacer sequence TTCN PAM
cacacagaauuucuuuuaca

SEQ ID NO: 31812 - RNA, 20 nt, Artificial Sequence
  HTT spacer sequence TTCN PAM
uuuuuuccagaaauugaaca

SEQ ID NO: 31813 - RNA, 20 nt, Artificial Sequence
  HTT spacer sequence TTCN PAM
agaaauugaacauugaagua

SEQ ID NO: 31814 - RNA, 20 nt, Artificial Sequence
  HTT spacer sequence TTCN PAM
ggaaaaaaugaauaauacuc

SEQ ID NO: 31815 - RNA, 20 nt, Artificial Sequence
  HTT spacer sequence TTCN PAM
auuucuggaaaaaaugaaua

SEQ ID NO: 31816 - RNA, 20 nt, Artificial Sequence
  HTT spacer sequence TTCN PAM
auguucaauuucuggaaaaa

SEQ ID NO: 31817 - RNA, 20 nt, Artificial Sequence
  HTT spacer sequence TTCN PAM
uuucuuucuauuuuuuuuuu

SEQ ID NO: 31818 - RNA, 20 nt, Artificial Sequence
  HTT spacer sequence TTCN PAM
uucuauuuuuuuuuuuugag

SEQ ID NO: 31819 - RNA, 20 nt, Artificial Sequence
  HTT spacer sequence TTCN PAM
auuuuuuuuuuuugagaugg

SEQ ID NO: 31820 - RNA, 20 nt, Artificial Sequence
  HTT spacer sequence TTCN PAM
ccugccucagccucuggagu

SEQ ID NO: 31821 - RNA, 20 nt, Artificial Sequence
  HTT spacer sequence TTCN PAM
ccauauuggccaggcugguc

SEQ ID NO: 31822 - RNA, 20 nt, Artificial Sequence
  HTT spacer sequence TTCN PAM
agaccagccuggccaauaug

SEQ ID NO: 31823 - RNA, 20 nt, Artificial Sequence
  HTT spacer sequence TTCN PAM
uaaagcacuguucugcucuu

SEQ ID NO: 31824 - RNA, 20 nt, Artificial Sequence
  HTT spacer sequence TTCN PAM
gcucuuucacaaaaauugua

SEQ ID NO: 31825 - RNA, 20 nt, Artificial Sequence
  HTT spacer sequence TTCN PAM
caaaaauuguaagggcuugg

SEQ ID NO: 31826 - RNA, 20 nt, Artificial Sequence
  HTT spacer sequence TTCN PAM
acugccucagccuccugagu

SEQ ID NO: 31827 - RNA, 20 nt, Artificial Sequence
  HTT spacer sequence TTCN PAM
ugccauucuacugccucagc

SEQ ID NO: 31828 - RNA, 20 nt, Artificial Sequence
  HTT spacer sequence TTCN PAM
aagucagccaauuugugcug

SEQ ID NO: 31829 - RNA, 20 nt, Artificial Sequence
  HTT spacer sequence TTCN PAM
uuuuuaaaugcaugucagug

SEQ ID NO: 31830 - RNA, 20 nt, Artificial Sequence
  HTT spacer sequence TTCN PAM
uucagaauguuccacuguag

SEQ ID NO: 31831 - RNA, 20 nt, Artificial Sequence
  HTT spacer sequence TTCN PAM
gaauguuccacuguagucau

SEQ ID NO: 31832 - RNA, 20 nt, Artificial Sequence
  HTT spacer sequence TTCN PAM
gaaugaacaacagugcacug

SEQ ID NO: 31833 - RNA, 20 nt, Artificial Sequence
  HTT spacer sequence TTCN PAM
acuguagucaucuuuaguaa

SEQ ID NO: 31834 - RNA, 20 nt, Artificial Sequence
  HTT spacer sequence TTCN PAM
ccauuucuguaagacuucac

SEQ ID NO: 31835 - RNA, 20 nt, Artificial Sequence
  HTT spacer sequence TTCN PAM
guaagacuucaccacuuucc

SEQ ID NO: 31836 - RNA, 20 nt, Artificial Sequence
  HTT spacer sequence TTCN PAM
ccacuuuccaugccuaacgu

SEQ ID NO: 31837 - RNA, 20 nt, Artificial Sequence
  HTT spacer sequence TTCN PAM
augccuaacguguaagccag

SEQ ID NO: 31838 - RNA, 20 nt, Artificial Sequence
  HTT spacer sequence TTCN PAM
ggcuuacacguuaggcaugg

SEQ ID NO: 31839 - RNA, 20 nt, Artificial Sequence
  HTT spacer sequence TTCN PAM
uucuggcuuacacguuaggc

SEQ ID NO: 31840 - RNA, 20 nt, Artificial Sequence
  HTT spacer sequence TTCN PAM
ggaaauuaaggaacccauuu

SEQ ID NO: 31841 - RNA, 20 nt, Artificial Sequence
  HTT spacer sequence TTCN PAM
ggaaaacuggguuccuucug

SEQ ID NO: 31842 - RNA, 20 nt, Artificial Sequence
  HTT spacer sequence TTCN PAM
uuaauuuccggaaaacuggg

SEQ ID NO: 31843 - RNA, 20 nt, Artificial Sequence
  HTT spacer sequence TTCN PAM
gguaaaaauggguuccuuaa

SEQ ID NO: 31844 - RNA, 20 nt, Artificial Sequence
  HTT spacer sequence TTCN PAM
cuugauuaauuuagccaaug

SEQ ID NO: 31845 - RNA, 20 nt, Artificial Sequence
  HTT spacer sequence TTCN PAM
uaccuaagugugcaagaaaa

SEQ ID NO: 31846 - RNA, 20 nt, Artificial Sequence
  HTT spacer sequence TTCN PAM
ugcacacuuagguaggaaaa

SEQ ID NO: 31847 - RNA, 20 nt, Artificial Sequence
  HTT spacer sequence TTCN PAM
uuuuucuugcacacuuaggu

SEQ ID NO: 31848 - RNA, 20 nt, Artificial Sequence
  HTT spacer sequence TTCN PAM
accccuuuguuucauuuuuc

SEQ ID NO: 31849 - RNA, 20 nt, Artificial Sequence
  HTT spacer sequence TTCN PAM
uggggauguuuguguucuac

SEQ ID NO: 31850 - RNA, 20 nt, Artificial Sequence
  HTT spacer sequence TTCN PAM
aaagccaaauuuuacacccc

SEQ ID NO: 31851 - RNA, 20 nt, Artificial Sequence
  HTT spacer sequence TTCN PAM
accaguuucuuucagaccca

SEQ ID NO: 31852 - RNA, 20 nt, Artificial Sequence
  HTT spacer sequence TTCN PAM
uucagacccagucagaugua

SEQ ID NO: 31853 - RNA, 20 nt, Artificial Sequence
  HTT spacer sequence TTCN PAM
gacccagucagauguaagag

SEQ ID NO: 31854 - RNA, 20 nt, Artificial Sequence
  HTT spacer sequence TTCN PAM
uggacccauccauuuucuuu

SEQ ID NO: 31855 - RNA, 20 nt, Artificial Sequence
  HTT spacer sequence TTCN PAM
uuggcgacuuccaaacccag

SEQ ID NO: 31856 - RNA, 20 nt, Artificial Sequence
  HTT spacer sequence TTCN PAM
aaacccaguuuggaucagaa

SEQ ID NO: 31857 - RNA, 20 nt, Artificial Sequence
  HTT spacer sequence TTCN PAM
gauccaaacuggguuuggaa

SEQ ID NO: 31858 - RNA, 20 nt, Artificial Sequence
  HTT spacer sequence TTCN PAM
uugugcaaauuucugaucca

SEQ ID NO: 31859 - RNA, 20 nt, Artificial Sequence
  HTT spacer sequence TTCN PAM
agcucucugaguuuucuuug

SEQ ID NO: 31860 - RNA, 20 nt, Artificial Sequence
  HTT spacer sequence TTCN PAM
cagagcagcuggggaucaug

SEQ ID NO: 31861 - RNA, 20 nt, Artificial Sequence
  HTT spacer sequence TTCN PAM
cucagugccccaggggucau

SEQ ID NO: 31862 - RNA, 20 nt, Artificial Sequence
  HTT spacer sequence TTCN PAM
aaugaccccuggggcacuga

SEQ ID NO: 31863 - RNA, 20 nt, Artificial Sequence
  HTT spacer sequence TTCN PAM
gacaccauguuaaaagaaaa

SEQ ID NO: 31864 - RNA, 20 nt, Artificial Sequence
  HTT spacer sequence TTCN PAM
uuuaacauggugucagaagu

SEQ ID NO: 31865 - RNA, 20 nt, Artificial Sequence
  HTT spacer sequence TTCN PAM
gccgaauuaaauuuaaagga

SEQ ID NO: 31866 - RNA, 20 nt, Artificial Sequence
  HTT spacer sequence TTCN PAM
gcugaaguuuuucuuuuaac

SEQ ID NO: 31867 - RNA, 20 nt, Artificial Sequence
  HTT spacer sequence TTCN PAM
uugcuuaauuaaacuccuuu

SEQ ID NO: 31868 - RNA, 20 nt, Artificial Sequence
  HTT spacer sequence TTCN PAM
ugaauugggcaguccucaga

SEQ ID NO: 31869 - RNA, 20 nt, Artificial Sequence
  HTT spacer sequence TTCN PAM
cgaaucauucauugcuuaau

SEQ ID NO: 31870 - RNA, 20 nt, Artificial Sequence
  HTT spacer sequence TTCN PAM
gaggacugcccaauucacga

SEQ ID NO: 31871 - RNA, 20 nt, Artificial Sequence
  HTT spacer sequence TTCN PAM
gagagacuccagggaugcuu

SEQ ID NO: 31872 - RNA, 20 nt, Artificial Sequence
  HTT spacer sequence TTCN PAM
uggucagaacaaauuuacag

SEQ ID NO: 31873 - RNA, 20 nt, Artificial Sequence
  HTT spacer sequence TTCN PAM
gaccaugaagcaucccugga

SEQ ID NO: 31874 - RNA, 20 nt, Artificial Sequence
  HTT spacer sequence TTCN PAM
cguuuuuugucuguaaauuu

SEQ ID NO: 31875 - RNA, 20 nt, Artificial Sequence
  HTT spacer sequence TTCN PAM
guacgucacuucccguuuuu

SEQ ID NO: 31876 - RNA, 20 nt, Artificial Sequence
  HTT spacer sequence TTCN PAM
guaccucaccuccaauuucu

SEQ ID NO: 31877 - RNA, 20 nt, Artificial Sequence
  HTT spacer sequence TTCN PAM
aaugaggcaaaugccgagcu

SEQ ID NO: 31878 - RNA, 20 nt, Artificial Sequence
  HTT spacer sequence TTCN PAM
cucauacacugcugagaguu

SEQ ID NO: 31879 - RNA, 20 nt, Artificial Sequence
  HTT spacer sequence TTCN PAM
aucuugucuaccuauaaguu

SEQ ID NO: 31880 - RNA, 20 nt, Artificial Sequence
  HTT spacer sequence TTCN PAM
uccacaaagacucaaauaca

SEQ ID NO: 31881 - RNA, 20 nt, Artificial Sequence
  HTT spacer sequence TTCN PAM
guauuugagucuuuguggau

SEQ ID NO: 31882 - RNA, 20 nt, Artificial Sequence
  HTT spacer sequence TTCN PAM
caggccauauuuaguuugcu

SEQ ID NO: 31883 - RNA, 20 nt, Artificial Sequence
  HTT spacer sequence TTCN PAM
gaaaauuuagaacaauuucc

SEQ ID NO: 31884 - RNA, 20 nt, Artificial Sequence
  HTT spacer sequence TTCN PAM
gaagggcaguuuggucauau

SEQ ID NO: 31885 - RNA, 20 nt, Artificial Sequence
  HTT spacer sequence TTCN PAM
aaauuuucagaagggcaguu

SEQ ID NO: 31886 - RNA, 20 nt, Artificial Sequence
  HTT spacer sequence TTCN PAM
ccuuucaccaaaaacguauu

SEQ ID NO: 31887 - RNA, 20 nt, Artificial Sequence
  HTT spacer sequence TTCN PAM
ccaaaaacguauuauaaugc

SEQ ID NO: 31888 - RNA, 20 nt, Artificial Sequence
  HTT spacer sequence TTCN PAM
ccaaaaaucagguuuuucuu

SEQ ID NO: 31889 - RNA, 20 nt, Artificial Sequence
  HTT spacer sequence TTCN PAM
uuuggcaaacaauuucacca

SEQ ID NO: 31890 - RNA, 20 nt, Artificial Sequence
  HTT spacer sequence TTCN PAM
ccagaaacuagguauuuccu

SEQ ID NO: 31891 - RNA, 20 nt, Artificial Sequence
  HTT spacer sequence TTCN PAM
ggugaaauuguuugccaaaa

SEQ ID NO: 31892 - RNA, 20 nt, Artificial Sequence
  HTT spacer sequence TTCN PAM
uuuucuuuucuuucuuuuaa

SEQ ID NO: 31893 - RNA, 20 nt, Artificial Sequence
  HTT spacer sequence TTCN PAM
uuucuuucuuuuaaaauuug

SEQ ID NO: 31894 - RNA, 20 nt, Artificial Sequence
  HTT spacer sequence TTCN PAM
uucuuuuaaaauuuguagua

SEQ ID NO: 31895 - RNA, 20 nt, Artificial Sequence
  HTT spacer sequence TTCN PAM
uuuaaaauuuguaguaaaau

SEQ ID NO: 31896 - RNA, 20 nt, Artificial Sequence
  HTT spacer sequence TTCN PAM
gaaacaaugucauacaguca

SEQ ID NO: 31897 - RNA, 20 nt, Artificial Sequence
  HTT spacer sequence TTCN PAM
gaacccuaugcuuaaaaauc

SEQ ID NO: 31898 - RNA, 20 nt, Artificial Sequence
  HTT spacer sequence TTCN PAM
uucaaucaguuugcacaguu

SEQ ID NO: 31899 - RNA, 20 nt, Artificial Sequence
  HTT spacer sequence TTCN PAM
aucaguuugcacaguuaacu

SEQ ID NO: 31900 - RNA, 20 nt, Artificial Sequence
  HTT spacer sequence TTCN PAM
gcuuuacaagaugcaaagag

SEQ ID NO: 31901 - RNA, 20 nt, Artificial Sequence
  HTT spacer sequence TTCN PAM
uggggacagagcuucagcuu

SEQ ID NO: 31902 - RNA, 20 nt, Artificial Sequence
  HTT spacer sequence TTCN PAM
accagccccuggcaauuacc

SEQ ID NO: 31903 - RNA, 20 nt, Artificial Sequence
  HTT spacer sequence TTCN PAM
gcccucuguuuuuaugaauu

SEQ ID NO: 31904 - RNA, 20 nt, Artificial Sequence
  HTT spacer sequence TTCN PAM
uaaaaacagagggcagaaug

SEQ ID NO: 31905 - RNA, 20 nt, Artificial Sequence
  HTT spacer sequence TTCN PAM
acugagacaggagauguaga

SEQ ID NO: 31906 - RNA, 20 nt, Artificial Sequence
  HTT spacer sequence TTCN PAM
uuuucuuuuuuuuuugaggc

SEQ ID NO: 31907 - RNA, 20 nt, Artificial Sequence
  HTT spacer sequence TTCN PAM
uuuuuuuuugaggcagaguc

SEQ ID NO: 31908 - RNA, 20 nt, Artificial Sequence
  HTT spacer sequence TTCN PAM
agcaauacuccugucucagc

SEQ ID NO: 31909 - RNA, 20 nt, Artificial Sequence
  HTT spacer sequence TTCN PAM
ccguguuggccaggaugguc

SEQ ID NO: 31910 - RNA, 20 nt, Artificial Sequence
  HTT spacer sequence TTCN PAM
ucuccugaccucgugaucug

SEQ ID NO: 31911 - RNA, 20 nt, Artificial Sequence
  HTT spacer sequence TTCN PAM
cuuagcauaaugaccucaag

SEQ ID NO: 31912 - RNA, 20 nt, Artificial Sequence
  HTT spacer sequence TTCN PAM
uccauguuguaguguguguc

SEQ ID NO: 31913 - RNA, 20 nt, Artificial Sequence
  HTT spacer sequence TTCN PAM
gacacacacuacaacaugga

SEQ ID NO: 31914 - RNA, 20 nt, Artificial Sequence
  HTT spacer sequence TTCN PAM
cuccuauuuaaggccaaaac

SEQ ID NO: 31915 - RNA, 20 nt, Artificial Sequence
  HTT spacer sequence TTCN PAM
auuguacauauguuacugga

SEQ ID NO: 31916 - RNA, 20 nt, Artificial Sequence
  HTT spacer sequence TTCN PAM
aguaacauauguacaaugga

SEQ ID NO: 31917 - RNA, 20 nt, Artificial Sequence
  HTT spacer sequence TTCN PAM
uggaucuugcucaagaaaga

SEQ ID NO: 31918 - RNA, 20 nt, Artificial Sequence
  HTT spacer sequence TTCN PAM
ugagcaagauccaagaaccc

SEQ ID NO: 31919 - RNA, 20 nt, Artificial Sequence
  HTT spacer sequence TTCN PAM
uucuugagcaagauccaaga

SEQ ID NO: 31920 - RNA, 20 nt, Artificial Sequence
  HTT spacer sequence TTCN PAM
gacgaguccacagaauaaaa

SEQ ID NO: 31921 - RNA, 20 nt, Artificial Sequence
  HTT spacer sequence TTCN PAM
guggacucgucugaauucuu

SEQ ID NO: 31922 - RNA, 20 nt, Artificial Sequence
  HTT spacer sequence TTCN PAM
uuuuauucuguggacucguc

SEQ ID NO: 31923 - RNA, 20 nt, Artificial Sequence
  HTT spacer sequence TTCN PAM
uaguaaacuuacuuucauuu

SEQ ID NO: 31924 - RNA, 20 nt, Artificial Sequence
  HTT spacer sequence TTCN PAM
uuggcuuucuuaguaaacuu

SEQ ID NO: 31925 - RNA, 20 nt, Artificial Sequence
  HTT spacer sequence TTCN PAM
cuauuccuuggcuuucuuag

SEQ ID NO: 31926 - RNA, 20 nt, Artificial Sequence
  HTT spacer sequence TTCN PAM
uuuuauuuauuuauuuauuu

SEQ ID NO: 31927 - RNA, 20 nt, Artificial Sequence
  HTT spacer sequence TTCN PAM
ugccauucuucugccucagc

SEQ ID NO: 31928 - RNA, 20 nt, Artificial Sequence
  HTT spacer sequence TTCN PAM
ucugccucagccuccugagu

SEQ ID NO: 31929 - RNA, 20 nt, Artificial Sequence
  HTT spacer sequence TTCN PAM
gccucagccuccugaguagc

SEQ ID NO: 31930 - RNA, 20 nt, Artificial Sequence
  HTT spacer sequence TTCN PAM
ccauguuagccaggaugguc

SEQ ID NO: 31931 - RNA, 20 nt, Artificial Sequence
  HTT spacer sequence TTCN PAM
ugauuauaugcuaaacaaga

SEQ ID NO: 31932 - RNA, 20 nt, Artificial Sequence
  HTT spacer sequence TTCN PAM
ugaguuuuccgugaaagggg

SEQ ID NO: 31933 - RNA, 20 nt, Artificial Sequence
  HTT spacer sequence TTCN PAM
gugaaaggggugggcaauuc

SEQ ID NO: 31934 - RNA, 20 nt, Artificial Sequence
  HTT spacer sequence TTCN PAM
cggaaaacucaugaauaauc

SEQ ID NO: 31935 - RNA, 20 nt, Artificial Sequence
  HTT spacer sequence TTCN PAM
cagaacugaggguuucuccc

SEQ ID NO: 31936 - RNA, 20 nt, Artificial Sequence
  HTT spacer sequence TTCN PAM
gggaauugcccaccccuuuc

SEQ ID NO: 31937 - RNA, 20 nt, Artificial Sequence
  HTT spacer sequence TTCN PAM
ccccuuuuuagaacauauag

SEQ ID NO: 31938 - RNA, 20 nt, Artificial Sequence
  HTT spacer sequence TTCN PAM
aaaaaggggagaaacccuca

SEQ ID NO: 31939 - RNA, 20 nt, Artificial Sequence
  HTT spacer sequence TTCN PAM
aggccaggcaugguggcuca

SEQ ID NO: 31940 - RNA, 20 nt, Artificial Sequence
  HTT spacer sequence TTCN PAM
ccauguuggucaagcugguc

SEQ ID NO: 31941 - RNA, 20 nt, Artificial Sequence
  HTT spacer sequence TTCN PAM
ccugccucagccucccgagu

SEQ ID NO: 31942 - RNA, 20 nt, Artificial Sequence
  HTT spacer sequence TTCN PAM
agcgauucuccugccucagc

SEQ ID NO: 31943 - RNA, 20 nt, Artificial Sequence
  HTT spacer sequence TTCN PAM
cggguucaagcgauucuccu

SEQ ID NO: 31944 - RNA, 20 nt, Artificial Sequence
  HTT spacer sequence TTCN PAM
uguugugcaggcuggagugc

SEQ ID NO: 31945 - RNA, 20 nt, Artificial Sequence
  HTT spacer sequence TTCN PAM
uucuuguugugcaggcugga

SEQ ID NO: 31946 - RNA, 20 nt, Artificial Sequence
  HTT spacer sequence TTCN PAM
uuugagacagaguuucauuc

SEQ ID NO: 31947 - RNA, 20 nt, Artificial Sequence
  HTT spacer sequence TTCN PAM
auuuuuuuuuuuucuuuuga

SEQ ID NO: 31948 - RNA, 20 nt, Artificial Sequence
  HTT spacer sequence TTCN PAM
auauguugccauggcaucag

SEQ ID NO: 31949 - RNA, 20 nt, Artificial Sequence
  HTT spacer sequence TTCN PAM
cacagcucauuauaagcuaa

SEQ ID NO: 31950 - RNA, 20 nt, Artificial Sequence
  HTT spacer sequence TTCN PAM
uugccaucuugguuuuggug

SEQ ID NO: 31951 - RNA, 20 nt, Artificial Sequence
  HTT spacer sequence TTCN PAM
uuacugcaaccuguuuuauc

SEQ ID NO: 31952 - RNA, 20 nt, Artificial Sequence
  HTT spacer sequence TTCN PAM
uagucacaggaugagguagg

SEQ ID NO: 31953 - RNA, 20 nt, Artificial Sequence
  HTT spacer sequence TTCN PAM
caggagguuaggcauucaua

SEQ ID NO: 31954 - RNA, 20 nt, Artificial Sequence
  HTT spacer sequence TTCN PAM
agaugaaguuguucugguuc

SEQ ID NO: 31955 - RNA, 20 nt, Artificial Sequence
  HTT spacer sequence TTCN PAM
ucuugaauaggggcggggua

SEQ ID NO: 31956 - RNA, 20 nt, Artificial Sequence
  HTT spacer sequence TTCN PAM
gguuccaacgccucugacau

SEQ ID NO: 31957 - RNA, 20 nt, Artificial Sequence
  HTT spacer sequence TTCN PAM
aacgccucugacauauuagc

SEQ ID NO: 31958 - RNA, 20 nt, Artificial Sequence
  HTT spacer sequence TTCN PAM
uuuuuuuuuuuccuuuuaaa

SEQ ID NO: 31959 - RNA, 20 nt, Artificial Sequence
  HTT spacer sequence TTCN PAM
uuuuaaauggggucuugcuc

SEQ ID NO: 31960 - RNA, 20 nt, Artificial Sequence
  HTT spacer sequence TTCN PAM
agcgauucucuugccucagc

SEQ ID NO: 31961 - RNA, 20 nt, Artificial Sequence
  HTT spacer sequence TTCN PAM
cuugccucagccucccgagu

SEQ ID NO: 31962 - RNA, 20 nt, Artificial Sequence
  HTT spacer sequence TTCN PAM
ccauguugcccaggcugauc

SEQ ID NO: 31963 - RNA, 20 nt, Artificial Sequence
  HTT spacer sequence TTCN PAM
acuuguuaaacugaaaacug

SEQ ID NO: 31964 - RNA, 20 nt, Artificial Sequence
  HTT spacer sequence TTCN PAM
guuuaacaaguggaaaugua

SEQ ID NO: 31965 - RNA, 20 nt, Artificial Sequence
  HTT spacer sequence TTCN PAM
cgggccaguuuucaguuuaa

SEQ ID NO: 31966 - RNA, 20 nt, Artificial Sequence
  HTT spacer sequence TTCN PAM
guacugccauccuugcgucc

SEQ ID NO: 31967 - RNA, 20 nt, Artificial Sequence
  HTT spacer sequence TTCN PAM
ucugcaaggacgcaaggaug

SEQ ID NO: 31968 - RNA, 20 nt, Artificial Sequence
  HTT spacer sequence TTCN PAM
gucugccuaccuacuaugcu

SEQ ID NO: 31969 - RNA, 20 nt, Artificial Sequence
  HTT spacer sequence TTCN PAM
guaacaacagcugugucuca

SEQ ID NO: 31970 - RNA, 20 nt, Artificial Sequence
  HTT spacer sequence TTCN PAM
ugcagccagacuucaaccac

SEQ ID NO: 31971 - RNA, 20 nt, Artificial Sequence
  HTT spacer sequence TTCN PAM
accacucacaggccgcaaac

SEQ ID NO: 31972 - RNA, 20 nt, Artificial Sequence
  HTT spacer sequence TTCN PAM
aacuguguucggagaaggcg

SEQ ID NO: 31973 - RNA, 20 nt, Artificial Sequence
  HTT spacer sequence TTCN PAM
gagaaggcgaauucaucugg

SEQ ID NO: 31974 - RNA, 20 nt, Artificial Sequence
  HTT spacer sequence TTCN PAM
ccgaacacaguuugaacagu

SEQ ID NO: 31975 - RNA, 20 nt, Artificial Sequence
  HTT spacer sequence TTCN PAM
ccuucuccgaacacaguuug

SEQ ID NO: 31976 - RNA, 20 nt, Artificial Sequence
  HTT spacer sequence TTCN PAM
ucuggcuguuaacgugccuc

SEQ ID NO: 31977 - RNA, 20 nt, Artificial Sequence
  HTT spacer sequence TTCN PAM
gcuuucuguggccacuuucc

SEQ ID NO: 31978 - RNA, 20 nt, Artificial Sequence
  HTT spacer sequence TTCN PAM
guggccacuuucccuuuucu

SEQ ID NO: 31979 - RNA, 20 nt, Artificial Sequence
  HTT spacer sequence TTCN PAM
cuuuucuguccauaaauuug

SEQ ID NO: 31980 - RNA, 20 nt, Artificial Sequence
  HTT spacer sequence TTCN PAM
guccauaaauuugcuuugac

SEQ ID NO: 31981 - RNA, 20 nt, Artificial Sequence
  HTT spacer sequence TTCN PAM
gggagacucuagggaugcug

SEQ ID NO: 31982 - RNA, 20 nt, Artificial Sequence
  HTT spacer sequence TTCN PAM
gggaccugcaccauuuguga

SEQ ID NO: 31983 - RNA, 20 nt, Artificial Sequence
  HTT spacer sequence TTCN PAM
caaauggugcaggucccaga

SEQ ID NO: 31984 - RNA, 20 nt, Artificial Sequence
  HTT spacer sequence TTCN PAM
uugaucagcuaaacucuguu

SEQ ID NO: 31985 - RNA, 20 nt, Artificial Sequence
  HTT spacer sequence TTCN PAM
auucaauuuguuggaaguuu

SEQ ID NO: 31986 - RNA, 20 nt, Artificial Sequence
  HTT spacer sequence TTCN PAM
auuuguuggaaguuuuuaac

SEQ ID NO: 31987 - RNA, 20 nt, Artificial Sequence
  HTT spacer sequence TTCN PAM
aacaaauugaauugaacaga

SEQ ID NO: 31988 - RNA, 20 nt, Artificial Sequence
  HTT spacer sequence TTCN PAM
aauuucuccacuuccucaua

SEQ ID NO: 31989 - RNA, 20 nt, Artificial Sequence
  HTT spacer sequence TTCN PAM
ccacuuccucauaaauaagu

SEQ ID NO: 31990 - RNA, 20 nt, Artificial Sequence
  HTT spacer sequence TTCN PAM
ucauaaauaagucauuuuaa

SEQ ID NO: 31991 - RNA, 20 nt, Artificial Sequence
  HTT spacer sequence TTCN PAM
guauuccaauauuuggaagu

SEQ ID NO: 31992 - RNA, 20 nt, Artificial Sequence
  HTT spacer sequence TTCN PAM
aauauuuggaaguauuaaug

SEQ ID NO: 31993 - RNA, 20 nt, Artificial Sequence
  HTT spacer sequence TTCN PAM
aaauauuggaauacugaaaa

SEQ ID NO: 31994 - RNA, 20 nt, Artificial Sequence
  HTT spacer sequence TTCN PAM
accaauuuucuauuuuugga

SEQ ID NO: 31995 - RNA, 20 nt, Artificial Sequence
  HTT spacer sequence TTCN PAM
auuuuuggacauugagguug

SEQ ID NO: 31996 - RNA, 20 nt, Artificial Sequence
  HTT spacer sequence TTCN PAM
uuuuuuuuuucuuuuuuuga

SEQ ID NO: 31997 - RNA, 20 nt, Artificial Sequence
  HTT spacer sequence TTCN PAM
uuuuuugagacagagucucg

SEQ ID NO: 31998 - RNA, 20 nt, Artificial Sequence
  HTT spacer sequence TTCN PAM
ccauguuggucaggcugguc

SEQ ID NO: 31999 - RNA, 20 nt, Artificial Sequence
  HTT spacer sequence TTCN PAM
ugauauuaauguugcuuuaa

SEQ ID NO: 32000 - RNA, 20 nt, Artificial Sequence
  HTT spacer sequence TTCN PAM
uucugucacccaggcuggag

SEQ ID NO: 32001 - RNA, 20 nt, Artificial Sequence
  HTT spacer sequence TTCN PAM
gucacccaggcuggaguuca

SEQ ID NO: 32002 - RNA, 20 nt, Artificial Sequence
  HTT spacer sequence TTCN PAM
guggcgugaucucagcucac

SEQ ID NO: 32003 - RNA, 20 nt, Artificial Sequence
  HTT spacer sequence TTCN PAM
agugauucuccugcgucggu

SEQ ID NO: 32004 - RNA, 20 nt, Artificial Sequence
  HTT spacer sequence TTCN PAM
ccugcgucggucuccugagu

SEQ ID NO: 32005 - RNA, 20 nt, Artificial Sequence
  HTT spacer sequence TTCN PAM
ugggucuuucgaugguuauu

SEQ ID NO: 32006 - RNA, 20 nt, Artificial Sequence
  HTT spacer sequence TTCN PAM
augguuauuuaauacuuccc

SEQ ID NO: 32007 - RNA, 20 nt, Artificial Sequence
  HTT spacer sequence TTCN PAM
cuacaguaaugcccugugcg

SEQ ID NO: 32008 - RNA, 20 nt, Artificial Sequence
  HTT spacer sequence TTCN PAM
ucacacuuagcauguacgca

SEQ ID NO: 32009 - RNA, 20 nt, Artificial Sequence
  HTT spacer sequence TTCN PAM
aaagauuuaacugugccaac

SEQ ID NO: 32010 - RNA, 20 nt, Artificial Sequence
  HTT spacer sequence TTCN PAM
gaaaagugauaggaggucau

SEQ ID NO: 32011 - RNA, 20 nt, Artificial Sequence
  HTT spacer sequence TTCN PAM
gaagagugacuuggcaaugu

SEQ ID NO: 32012 - RNA, 20 nt, Artificial Sequence
  HTT spacer sequence TTCN PAM
uaaaauugcuaugaccuccu

SEQ ID NO: 32013 - RNA, 20 nt, Artificial Sequence
  HTT spacer sequence TTCN PAM
acauuuccuuacuaaucucg

SEQ ID NO: 32014 - RNA, 20 nt, Artificial Sequence
  HTT spacer sequence TTCN PAM
uuacuaaucucgguuggugu

SEQ ID NO: 32015 - RNA, 20 nt, Artificial Sequence
  HTT spacer sequence TTCN PAM
aucuuuccucacacuuuucu

SEQ ID NO: 32016 - RNA, 20 nt, Artificial Sequence
  HTT spacer sequence TTCN PAM
ucacacuuuucuuggguuuu

SEQ ID NO: 32017 - RNA, 20 nt, Artificial Sequence
  HTT spacer sequence TTCN PAM
uggguuuuuccugaaucaug

SEQ ID NO: 32018 - RNA, 20 nt, Artificial Sequence
  HTT spacer sequence TTCN PAM
ugaaucaugagucuacuaca

SEQ ID NO: 32019 - RNA, 20 nt, Artificial Sequence
  HTT spacer sequence TTCN PAM
ggaaaaacccaagaaaagug

SEQ ID NO: 32020 - RNA, 20 nt, Artificial Sequence
  HTT spacer sequence TTCN PAM
aaagaugcuuuaaaaugugu

SEQ ID NO: 32021 - RNA, 20 nt, Artificial Sequence
  HTT spacer sequence TTCN PAM
accucugaaaccccaaaauu

SEQ ID NO: 32022 - RNA, 20 nt, Artificial Sequence
  HTT spacer sequence TTCN PAM
gagguggaaggaucacuuga

SEQ ID NO: 32023 - RNA, 20 nt, Artificial Sequence
  HTT spacer sequence TTCN PAM
caaauuuugggguuucagag

SEQ ID NO: 32024 - RNA, 20 nt, Artificial Sequence
  HTT spacer sequence TTCN PAM
aaauuaaaugagaccuuucu

SEQ ID NO: 32025 - RNA, 20 nt, Artificial Sequence
  HTT spacer sequence TTCN PAM
uuuuaacucguauaucauca

SEQ ID NO: 32026 - RNA, 20 nt, Artificial Sequence
  HTT spacer sequence TTCN PAM
uacccucaguaucugccuaa

SEQ ID NO: 32027 - RNA, 20 nt, Artificial Sequence
  HTT spacer sequence TTCN PAM
uuucaaugaaaagcagcccc

SEQ ID NO: 32028 - RNA, 20 nt, Artificial Sequence
  HTT spacer sequence TTCN PAM
augaaaagcagcccccaagc

SEQ ID NO: 32029 - RNA, 20 nt, Artificial Sequence
  HTT spacer sequence TTCN PAM
uugaaaagaaaaccuuaccg

SEQ ID NO: 32030 - RNA, 20 nt, Artificial Sequence
  HTT spacer sequence TTCN PAM
uuucuaacaaagagcagccu

SEQ ID NO: 32031 - RNA, 20 nt, Artificial Sequence
  HTT spacer sequence TTCN PAM
aacaaagagcagccuguaaa

SEQ ID NO: 32032 - RNA, 20 nt, Artificial Sequence
  HTT spacer sequence TTCN PAM
agcuugcuuguguaugucug

SEQ ID NO: 32033 - RNA, 20 nt, Artificial Sequence
  HTT spacer sequence TTCN PAM
ccugugcaagcuuccagcuu

SEQ ID NO: 32034 - RNA, 20 nt, Artificial Sequence
  HTT spacer sequence TTCN PAM
uauuggcacagcugccagca

SEQ ID NO: 32035 - RNA, 20 nt, Artificial Sequence
  HTT spacer sequence TTCN PAM
cuuuccuugucaaccaugug

SEQ ID NO: 32036 - RNA, 20 nt, Artificial Sequence
  HTT spacer sequence TTCN PAM
uugucaaccaugugcacagu

SEQ ID NO: 32037 - RNA, 20 nt, Artificial Sequence
  HTT spacer sequence TTCN PAM
uugcaugcuauguaaacauu

SEQ ID NO: 32038 - RNA, 20 nt, Artificial Sequence
  HTT spacer sequence TTCN PAM
gccgcaggcuggaagaccca

SEQ ID NO: 32039 - RNA, 20 nt, Artificial Sequence
  HTT spacer sequence TTCN PAM
agccugcggcagaauggaca

SEQ ID NO: 32040 - RNA, 20 nt, Artificial Sequence
  HTT spacer sequence TTCN PAM
uuuuucucuuucuuucaccu

SEQ ID NO: 32041 - RNA, 20 nt, Artificial Sequence
  HTT spacer sequence TTCN PAM
cuuucuuucaccuauuaaag

SEQ ID NO: 32042 - RNA, 20 nt, Artificial Sequence
  HTT spacer sequence TTCN PAM
uucaccuauuaaagcuccac

SEQ ID NO: 32043 - RNA, 20 nt, Artificial Sequence
  HTT spacer sequence TTCN PAM
ccuauuaaagcuccacucuu

SEQ ID NO: 32044 - RNA, 20 nt, Artificial Sequence
  HTT spacer sequence TTCN PAM
ugauuuccuuggcaugaggc

SEQ ID NO: 32045 - RNA, 20 nt, Artificial Sequence
  HTT spacer sequence TTCN PAM
uuggcaugaggcaaugaacc

SEQ ID NO: 32046 - RNA, 20 nt, Artificial Sequence
  HTT spacer sequence TTCN PAM
uugccucaugccaaggaaau

SEQ ID NO: 32047 - RNA, 20 nt, Artificial Sequence
  HTT spacer sequence TTCN PAM
gggguaauacccaagguuca

SEQ ID NO: 32048 - RNA, 20 nt, Artificial Sequence
  HTT spacer sequence TTCN PAM
gugacacagccucaggaaau

SEQ ID NO: 32049 - RNA, 20 nt, Artificial Sequence
  HTT spacer sequence TTCN PAM
ugaggcugugucacugaagu

SEQ ID NO: 32050 - RNA, 20 nt, Artificial Sequence
  HTT spacer sequence TTCN PAM
caagauggucggggcacagc

SEQ ID NO: 32051 - RNA, 20 nt, Artificial Sequence
  HTT spacer sequence TTCN PAM
uauauguaagaaguacauug

SEQ ID NO: 32052 - RNA, 20 nt, Artificial Sequence
  HTT spacer sequence TTCN PAM
uacauauaugaauugacguc

SEQ ID NO: 32053 - RNA, 20 nt, Artificial Sequence
  HTT spacer sequence TTCN PAM
guccagaaaggcggggacaa

SEQ ID NO: 32054 - RNA, 20 nt, Artificial Sequence
  HTT spacer sequence TTCN PAM
ggacggaaccaauguacuuc

SEQ ID NO: 32055 - RNA, 20 nt, Artificial Sequence
  HTT spacer sequence TTCN PAM
aggucacagguagacaaaug

SEQ ID NO: 32056 - RNA, 20 nt, Artificial Sequence
  HTT spacer sequence TTCN PAM
uuugaaucuccgauaagccu

SEQ ID NO: 32057 - RNA, 20 nt, Artificial Sequence
  HTT spacer sequence TTCN PAM
aaagaaugcaaccauuuguc

SEQ ID NO: 32058 - RNA, 20 nt, Artificial Sequence
  HTT spacer sequence TTCN PAM
aaaggaggcaaucagaauau

SEQ ID NO: 32059 - RNA, 20 nt, Artificial Sequence
  HTT spacer sequence TTCN PAM
gauugccuccuuuggaaagg

SEQ ID NO: 32060 - RNA, 20 nt, Artificial Sequence
  HTT spacer sequence TTCN PAM
ccauguuggccgggcugcuc

SEQ ID NO: 32061 - RNA, 20 nt, Artificial Sequence
  HTT spacer sequence TTCN PAM
ccugccucagccucccgagu

SEQ ID NO: 32062 - RNA, 20 nt, Artificial Sequence
  HTT spacer sequence TTCN PAM
agcuauucuccugccucagc

SEQ ID NO: 32063 - RNA, 20 nt, Artificial Sequence
  HTT spacer sequence TTCN PAM
ggguucaagcuauucuccug

SEQ ID NO: 32064 - RNA, 20 nt, Artificial Sequence
  HTT spacer sequence TTCN PAM
uucuggguucaagcuauucu

SEQ ID NO: 32065 - RNA, 20 nt, Artificial Sequence
  HTT spacer sequence TTCN PAM
cucuuguugcccaggcugga

SEQ ID NO: 32066 - RNA, 20 nt, Artificial Sequence
  HTT spacer sequence TTCN PAM
gagauggaguuucacucuug

SEQ ID NO: 32067 - RNA, 20 nt, Artificial Sequence
  HTT spacer sequence TTCN PAM
caaagugcugggauuacagg

SEQ ID NO: 32068 - RNA, 20 nt, Artificial Sequence
  HTT spacer sequence TTCN PAM
ucauguuagccaggaugguc

SEQ ID NO: 32069 - RNA, 20 nt, Artificial Sequence
  HTT spacer sequence TTCN PAM
ccugccucagccugccgagu

SEQ ID NO: 32070 - RNA, 20 nt, Artificial Sequence
  HTT spacer sequence TTCN PAM
cgccauucuccugccucagc

SEQ ID NO: 32071 - RNA, 20 nt, Artificial Sequence
  HTT spacer sequence TTCN PAM
cucucucuuuuuuuuuuuuu

SEQ ID NO: 32072 - RNA, 20 nt, Artificial Sequence
  HTT spacer sequence TTCN PAM
gcucacugagauagaugcau

SEQ ID NO: 32073 - RNA, 20 nt, Artificial Sequence
  HTT spacer sequence TTCN PAM
aagucauccuucugcucacu

SEQ ID NO: 32074 - RNA, 20 nt, Artificial Sequence
  HTT spacer sequence TTCN PAM
auucaaagucauccuucugc

SEQ ID NO: 32075 - RNA, 20 nt, Artificial Sequence
  HTT spacer sequence TTCN PAM
uagcuugaacuuccccuuua

SEQ ID NO: 32076 - RNA, 20 nt, Artificial Sequence
  HTT spacer sequence TTCN PAM
agcuaggaacugcucccauu

SEQ ID NO: 32077 - RNA, 20 nt, Artificial Sequence
  HTT spacer sequence TTCN PAM
ccuuuagcuucagugauuug

SEQ ID NO: 32078 - RNA, 20 nt, Artificial Sequence
  HTT spacer sequence TTCN PAM
gugauuugggggcucaaggu

SEQ ID NO: 32079 - RNA, 20 nt, Artificial Sequence
  HTT spacer sequence TTCN PAM
uuucacauaccucagccucc

SEQ ID NO: 32080 - RNA, 20 nt, Artificial Sequence
  HTT spacer sequence TTCN PAM
cauaccucagccucccaagu

SEQ ID NO: 32081 - RNA, 20 nt, Artificial Sequence
  HTT spacer sequence TTCN PAM
uacaaaaaaaauaaaacauu

SEQ ID NO: 32082 - RNA, 20 nt, Artificial Sequence
  HTT spacer sequence TTCN PAM
ggaggcugaggcgggaggac

SEQ ID NO: 32083 - RNA, 20 nt, Artificial Sequence
  HTT spacer sequence TTCN PAM
aaguucccucuccaaaaccu

SEQ ID NO: 32084 - RNA, 20 nt, Artificial Sequence
  HTT spacer sequence TTCN PAM
cucuccaaaaccucaugguu

SEQ ID NO: 32085 - RNA, 20 nt, Artificial Sequence
  HTT spacer sequence TTCN PAM
cuguucucauccccugcacc

SEQ ID NO: 32086 - RNA, 20 nt, Artificial Sequence
  HTT spacer sequence TTCN PAM
cauccccugcacccucccuu

SEQ ID NO: 32087 - RNA, 20 nt, Artificial Sequence
  HTT spacer sequence TTCN PAM
ccuggaguacucaccuggcc

SEQ ID NO: 32088 - RNA, 20 nt, Artificial Sequence
  HTT spacer sequence TTCN PAM
auucuaggcacagcauguga

SEQ ID NO: 32089 - RNA, 20 nt, Artificial Sequence
  HTT spacer sequence TTCN PAM
aggcacagcaugugaugagc

SEQ ID NO: 32090 - RNA, 20 nt, Artificial Sequence
  HTT spacer sequence TTCN PAM
ccgccuugacagugagaaag

SEQ ID NO: 32091 - RNA, 20 nt, Artificial Sequence
  HTT spacer sequence TTCN PAM
cacugucaaggcggugaagc

SEQ ID NO: 32092 - RNA, 20 nt, Artificial Sequence
  HTT spacer sequence TTCN PAM
gcucauucucgaagucucaa

SEQ ID NO: 32093 - RNA, 20 nt, Artificial Sequence
  HTT spacer sequence TTCN PAM
cgaagucucaaacuucacuu

SEQ ID NO: 32094 - RNA, 20 nt, Artificial Sequence
  HTT spacer sequence TTCN PAM
agaaugagccgaagggagac

SEQ ID NO: 32095 - RNA, 20 nt, Artificial Sequence
  HTT spacer sequence TTCN PAM
cuucuccugugcgcugauuc

SEQ ID NO: 32096 - RNA, 20 nt, Artificial Sequence
  HTT spacer sequence TTCN PAM
ccugugcgcugauucugaau

SEQ ID NO: 32097 - RNA, 20 nt, Artificial Sequence
  HTT spacer sequence TTCN PAM
gaauucagcccccguccaag

SEQ ID NO: 32098 - RNA, 20 nt, Artificial Sequence
  HTT spacer sequence TTCN PAM
gaaucagcgcacaggagaag

SEQ ID NO: 32099 - RNA, 20 nt, Artificial Sequence
  HTT spacer sequence TTCN PAM
gcccccguccaagguccugg

SEQ ID NO: 32100 - RNA, 20 nt, Artificial Sequence
  HTT spacer sequence TTCN PAM
cuucugcuuggcguguuguu

SEQ ID NO: 32101 - RNA, 20 nt, Artificial Sequence
  HTT spacer sequence TTCN PAM
gcuuggcguguuguucauca

SEQ ID NO: 32102 - RNA, 20 nt, Artificial Sequence
  HTT spacer sequence TTCN PAM
ucaccacugugcacugcuga

SEQ ID NO: 32103 - RNA, 20 nt, Artificial Sequence
  HTT spacer sequence TTCN PAM
cuggaccucugcuuuaucau

SEQ ID NO: 32104 - RNA, 20 nt, Artificial Sequence
  HTT spacer sequence TTCN PAM
aaugauaaagcagaggucca

SEQ ID NO: 32105 - RNA, 20 nt, Artificial Sequence
  HTT spacer sequence TTCN PAM
cacgacauuccuuucacuuc

SEQ ID NO: 32106 - RNA, 20 nt, Artificial Sequence
  HTT spacer sequence TTCN PAM
uuucacuucucacuuggaag

SEQ ID NO: 32107 - RNA, 20 nt, Artificial Sequence
  HTT spacer sequence TTCN PAM
cuucucacuuggaagaugag

SEQ ID NO: 32108 - RNA, 20 nt, Artificial Sequence
  HTT spacer sequence TTCN PAM
cacuuggaagaugagccgug

SEQ ID NO: 32109 - RNA, 20 nt, Artificial Sequence
  HTT spacer sequence TTCN PAM
aagugagaagugaaaggaau

SEQ ID NO: 32110 - RNA, 20 nt, Artificial Sequence
  HTT spacer sequence TTCN PAM
ucacggcucaucuuccaagu

SEQ ID NO: 32111 - RNA, 20 nt, Artificial Sequence
  HTT spacer sequence TTCN PAM
gcuugacuugagggccaagc

SEQ ID NO: 32112 - RNA, 20 nt, Artificial Sequence
  HTT spacer sequence TTCN PAM
uauuuaaaaccauggcuugc

SEQ ID NO: 32113 - RNA, 20 nt, Artificial Sequence
  HTT spacer sequence TTCN PAM
uucuuauuuaaaaccauggc

SEQ ID NO: 32114 - RNA, 20 nt, Artificial Sequence
  HTT spacer sequence TTCN PAM
aaccuucaucuucuaguaag

SEQ ID NO: 32115 - RNA, 20 nt, Artificial Sequence
  HTT spacer sequence TTCN PAM
ucuucuaguaaggaaacaag

SEQ ID NO: 32116 - RNA, 20 nt, Artificial Sequence
  HTT spacer sequence TTCN PAM
aguaaggaaacaagugggcu

SEQ ID NO: 32117 - RNA, 20 nt, Artificial Sequence
  HTT spacer sequence TTCN PAM
uuacuagaagaugaagguua

SEQ ID NO: 32118 - RNA, 20 nt, Artificial Sequence
  HTT spacer sequence TTCN PAM
ugcucaggaaagaccuaugu

SEQ ID NO: 32119 - RNA, 20 nt, Artificial Sequence
  HTT spacer sequence TTCN PAM
ugagcaagaacucuaaagcc

SEQ ID NO: 32120 - RNA, 20 nt, Artificial Sequence
  HTT spacer sequence TTCN PAM
ugauccuccuccccaggcca

SEQ ID NO: 32121 - RNA, 20 nt, Artificial Sequence
  HTT spacer sequence TTCN PAM
ugacauucauagucuaguua

SEQ ID NO: 32122 - RNA, 20 nt, Artificial Sequence
  HTT spacer sequence TTCN PAM
uagucuaguuacacgauccc

SEQ ID NO: 32123 - RNA, 20 nt, Artificial Sequence
  HTT spacer sequence TTCN PAM
acugacccuuacagggaucg

SEQ ID NO: 32124 - RNA, 20 nt, Artificial Sequence
  HTT spacer sequence TTCN PAM
uuuguagcacuuacuucaac

SEQ ID NO: 32125 - RNA, 20 nt, Artificial Sequence
  HTT spacer sequence TTCN PAM
uucauggggagggauaugga

SEQ ID NO: 32126 - RNA, 20 nt, Artificial Sequence
  HTT spacer sequence TTCN PAM
uggggagggauauggaucag

SEQ ID NO: 32127 - RNA, 20 nt, Artificial Sequence
  HTT spacer sequence TTCN PAM
gucccgagggaaagaaaguc

SEQ ID NO: 32128 - RNA, 20 nt, Artificial Sequence
  HTT spacer sequence TTCN PAM
cucgggacugaaacaccucu

SEQ ID NO: 32129 - RNA, 20 nt, Artificial Sequence
  HTT spacer sequence TTCN PAM
uucccucgggacugaaacac

SEQ ID NO: 32130 - RNA, 20 nt, Artificial Sequence
  HTT spacer sequence TTCN PAM
uguaggacgacagagauggc

SEQ ID NO: 32131 - RNA, 20 nt, Artificial Sequence
  HTT spacer sequence TTCN PAM
gagccccugggggugcagua

SEQ ID NO: 32132 - RNA, 20 nt, Artificial Sequence
  HTT spacer sequence TTCN PAM
gcaugccuggccagugcaga

SEQ ID NO: 32133 - RNA, 20 nt, Artificial Sequence
  HTT spacer sequence TTCN PAM
guucaguagcacuggacaga

SEQ ID NO: 32134 - RNA, 20 nt, Artificial Sequence
  HTT spacer sequence TTCN PAM
guagcacuggacagaaggcc

SEQ ID NO: 32135 - RNA, 20 nt, Artificial Sequence
  HTT spacer sequence TTCN PAM
guccagugcuacugaacaga

SEQ ID NO: 32136 - RNA, 20 nt, Artificial Sequence
  HTT spacer sequence TTCN PAM
ugagacagcaccauuucugg

SEQ ID NO: 32137 - RNA, 20 nt, Artificial Sequence
  HTT spacer sequence TTCN PAM
gggaagagagucaccuggga

SEQ ID NO: 32138 - RNA, 20 nt, Artificial Sequence
  HTT spacer sequence TTCN PAM
cagaaauggugcugucucaa

SEQ ID NO: 32139 - RNA, 20 nt, Artificial Sequence
  HTT spacer sequence TTCN PAM
ccuccaagccggagcguggc

SEQ ID NO: 32140 - RNA, 20 nt, Artificial Sequence
  HTT spacer sequence TTCN PAM
ugcagcagccccucucuuca

SEQ ID NO: 32141 - RNA, 20 nt, Artificial Sequence
  HTT spacer sequence TTCN PAM
uucuugcagcagccccucuc

SEQ ID NO: 32142 - RNA, 20 nt, Artificial Sequence
  HTT spacer sequence TTCN PAM
ugaccagccugggcaacaca

SEQ ID NO: 32143 - RNA, 20 nt, Artificial Sequence
  HTT spacer sequence TTCN PAM
caccucagccuccccaagcg

SEQ ID NO: 32144 - RNA, 20 nt, Artificial Sequence
  HTT spacer sequence TTCN PAM
ccaccauccccuccauaaaa

SEQ ID NO: 32145 - RNA, 20 nt, Artificial Sequence
  HTT spacer sequence TTCN PAM
uaccacccacaaccuucacc

SEQ ID NO: 32146 - RNA, 20 nt, Artificial Sequence
  HTT spacer sequence TTCN PAM
uacuauuucauaccacccac

SEQ ID NO: 32147 - RNA, 20 nt, Artificial Sequence
  HTT spacer sequence TTCN PAM
ugccacagagcuccuaaaau

SEQ ID NO: 32148 - RNA, 20 nt, Artificial Sequence
  HTT spacer sequence TTCN PAM
caggauuuuaggagcucugu

SEQ ID NO: 32149 - RNA, 20 nt, Artificial Sequence
  HTT spacer sequence TTCN PAM
ugggugagcaucuuuuguuc

SEQ ID NO: 32150 - RNA, 20 nt, Artificial Sequence
  HTT spacer sequence TTCN PAM
aaugaggugacucuuggugg

SEQ ID NO: 32151 - RNA, 20 nt, Artificial Sequence
  HTT spacer sequence TTCN PAM
cuccuauccaggagccacca

SEQ ID NO: 32152 - RNA, 20 nt, Artificial Sequence
  HTT spacer sequence TTCN PAM
ggugauucacuccuauccag

SEQ ID NO: 32153 - RNA, 20 nt, Artificial Sequence
  HTT spacer sequence TTCN PAM
aacucuggcuugaucuuucu

SEQ ID NO: 32154 - RNA, 20 nt, Artificial Sequence
  HTT spacer sequence TTCN PAM
gcuucuaacucuggcuugau

SEQ ID NO: 32155 - RNA, 20 nt, Artificial Sequence
  HTT spacer sequence TTCN PAM
uguguuauagccagcacuuu

SEQ ID NO: 32156 - RNA, 20 nt, Artificial Sequence
  HTT spacer sequence TTCN PAM
agugauucuccugccucagc

SEQ ID NO: 32157 - RNA, 20 nt, Artificial Sequence
  HTT spacer sequence TTCN PAM
ccugccucagccuccugagc

SEQ ID NO: 32158 - RNA, 20 nt, Artificial Sequence
  HTT spacer sequence TTCN PAM
ccauauuaaccaggcuggcc

SEQ ID NO: 32159 - RNA, 20 nt, Artificial Sequence
  HTT spacer sequence TTCN PAM
uaaaagaaucaacuaacuaa

SEQ ID NO: 32160 - RNA, 20 nt, Artificial Sequence
  HTT spacer sequence TTCN PAM
uuuaagaacaaugucuuuug

SEQ ID NO: 32161 - RNA, 20 nt, Artificial Sequence
  HTT spacer sequence TTCN PAM
uaauuagguuagauuuuuau

SEQ ID NO: 32162 - RNA, 20 nt, Artificial Sequence
  HTT spacer sequence TTCN PAM
aggggagaaaaaucauguaa

SEQ ID NO: 32163 - RNA, 20 nt, Artificial Sequence
  HTT spacer sequence TTCN PAM
ccccuugaaauuaauuuuug

SEQ ID NO: 32164 - RNA, 20 nt, Artificial Sequence
  HTT spacer sequence TTCN PAM
cucuuuacaugauuuuucuc

SEQ ID NO: 32165 - RNA, 20 nt, Artificial Sequence
  HTT spacer sequence TTCN PAM
uuaucuuucucucuuuacau

SEQ ID NO: 32166 - RNA, 20 nt, Artificial Sequence
  HTT spacer sequence TTCN PAM
gcaaaguauucauuaucuuu

SEQ ID NO: 32167 - RNA, 20 nt, Artificial Sequence
  HTT spacer sequence TTCN PAM
uaaauuucugcaaaguauuc

SEQ ID NO: 32168 - RNA, 20 nt, Artificial Sequence
  HTT spacer sequence TTCN PAM
uccaaguuuuauguuuaugu

SEQ ID NO: 32169 - RNA, 20 nt, Artificial Sequence
  HTT spacer sequence TTCN PAM
aggaaaacauaauuuaucaa

SEQ ID NO: 32170 - RNA, 20 nt, Artificial Sequence
  HTT spacer sequence TTCN PAM
uagaaaugcauuucauccaa

SEQ ID NO: 32171 - RNA, 20 nt, Artificial Sequence
  HTT spacer sequence TTCN PAM
auuuuacuugugguuaguuu

SEQ ID NO: 32172 - RNA, 20 nt, Artificial Sequence
  HTT spacer sequence TTCN PAM
agagaagaaguaaaguuguc

SEQ ID NO: 32173 - RNA, 20 nt, Artificial Sequence
  HTT spacer sequence TTCN PAM
cuugaaaauauccuauuuag

SEQ ID NO: 32174 - RNA, 20 nt, Artificial Sequence
  HTT spacer sequence TTCN PAM
ucucuugaaaauauccuauu

SEQ ID NO: 32175 - RNA, 20 nt, Artificial Sequence
  HTT spacer sequence TTCN PAM
aaaaaacaccaggcucaaac

SEQ ID NO: 32176 - RNA, 20 nt, Artificial Sequence
  HTT spacer sequence TTCN PAM
caugucagauuguuugagcc

SEQ ID NO: 32177 - RNA, 20 nt, Artificial Sequence
  HTT spacer sequence TTCN PAM
aaguuuuauuugcucucuaa

SEQ ID NO: 32178 - RNA, 20 nt, Artificial Sequence
  HTT spacer sequence TTCN PAM
agcccauucaaaguuuuauu

SEQ ID NO: 32179 - RNA, 20 nt, Artificial Sequence
  HTT spacer sequence TTCN PAM
agacucuagaaaaacaaaac

SEQ ID NO: 32180 - RNA, 20 nt, Artificial Sequence
  HTT spacer sequence TTCN PAM
agagucuggaauauuucaag

SEQ ID NO: 32181 - RNA, 20 nt, Artificial Sequence
  HTT spacer sequence TTCN PAM
caauucuuuuuauaaagcaa

SEQ ID NO: 32182 - RNA, 20 nt, Artificial Sequence
  HTT spacer sequence TTCN PAM
uuuuauaaagcaaguauaaa

SEQ ID NO: 32183 - RNA, 20 nt, Artificial Sequence
  HTT spacer sequence TTCN PAM
uaccaaucucuuuuaugaau

SEQ ID NO: 32184 - RNA, 20 nt, Artificial Sequence
  HTT spacer sequence TTCN PAM
uaaaagagauugguaugaag

SEQ ID NO: 32185 - RNA, 20 nt, Artificial Sequence
  HTT spacer sequence TTCN PAM
gucugguaauacuuuauuaa

SEQ ID NO: 32186 - RNA, 20 nt, Artificial Sequence
  HTT spacer sequence TTCN PAM
auaaugcauggaugguucaa

SEQ ID NO: 32187 - RNA, 20 nt, Artificial Sequence
  HTT spacer sequence TTCN PAM
auacaaggaaauucaguaac

SEQ ID NO: 32188 - RNA, 20 nt, Artificial Sequence
  HTT spacer sequence TTCN PAM
uuguauugaaccauccaugc

SEQ ID NO: 32189 - RNA, 20 nt, Artificial Sequence
  HTT spacer sequence TTCN PAM
guaacacaauauaauagauc

SEQ ID NO: 32190 - RNA, 20 nt, Artificial Sequence
  HTT spacer sequence TTCN PAM
caugaucuauuauauugugu

SEQ ID NO: 32191 - RNA, 20 nt, Artificial Sequence
  HTT spacer sequence TTCN PAM
uuggguauauucacaugauc

SEQ ID NO: 32192 - RNA, 20 nt, Artificial Sequence
  HTT spacer sequence TTCN PAM
uagaugcuguaaaggcauuu

SEQ ID NO: 32193 - RNA, 20 nt, Artificial Sequence
  HTT spacer sequence TTCN PAM
acaccuacuuuuuagguggu

SEQ ID NO: 32194 - RNA, 20 nt, Artificial Sequence
  HTT spacer sequence TTCN PAM
uuagcaugauaaaauauauu

SEQ ID NO: 32195 - RNA, 20 nt, Artificial Sequence
  HTT spacer sequence TTCN PAM
gggcugauaaauauauuuua

SEQ ID NO: 32196 - RNA, 20 nt, Artificial Sequence
  HTT spacer sequence TTCN PAM
cuccagcgugugcccuuauc

SEQ ID NO: 32197 - RNA, 20 nt, Artificial Sequence
  HTT spacer sequence TTCN PAM
uaauuuuaacauuauucccu

SEQ ID NO: 32198 - RNA, 20 nt, Artificial Sequence
  HTT spacer sequence TTCN PAM
uucuucuuuuuuuuuuuuga

SEQ ID NO: 32199 - RNA, 20 nt, Artificial Sequence
  HTT spacer sequence TTCN PAM
ucuuuuuuuuuuuugagacg

SEQ ID NO: 32200 - RNA, 20 nt, Artificial Sequence
  HTT spacer sequence TTCN PAM
uuuuuuuuuuugagacggag

SEQ ID NO: 32201 - RNA, 20 nt, Artificial Sequence
  HTT spacer sequence TTCN PAM
agcgauucuccugccucagc

SEQ ID NO: 32202 - RNA, 20 nt, Artificial Sequence
  HTT spacer sequence TTCN PAM
ccugccucagccucccgagu

SEQ ID NO: 32203 - RNA, 20 nt, Artificial Sequence
  HTT spacer sequence TTCN PAM
ccauguuggucaggcugguc

SEQ ID NO: 32204 - RNA, 20 nt, Artificial Sequence
  HTT spacer sequence TTCN PAM
agaccagccugaccaacaug

SEQ ID NO: 32205 - RNA, 20 nt, Artificial Sequence
  HTT spacer sequence TTCN PAM
acauuauccuuaauacugau

SEQ ID NO: 32206 - RNA, 20 nt, Artificial Sequence
  HTT spacer sequence TTCN PAM
acuuauuauggauuuaucua

SEQ ID NO: 32207 - RNA, 20 nt, Artificial Sequence
  HTT spacer sequence TTCN PAM
cagcuucacaagacaguauu

SEQ ID NO: 32208 - RNA, 20 nt, Artificial Sequence
  HTT spacer sequence TTCN PAM
caagacaguauuacguagca

SEQ ID NO: 32209 - RNA, 20 nt, Artificial Sequence
  HTT spacer sequence TTCN PAM
ccaggcuagugaugugcuac

SEQ ID NO: 32210 - RNA, 20 nt, Artificial Sequence
  HTT spacer sequence TTCN PAM
acuuugaucuuuccccaggc

SEQ ID NO: 32211 - RNA, 20 nt, Artificial Sequence
  HTT spacer sequence TTCN PAM
aauuuucaacuuugaucuuu

SEQ ID NO: 32212 - RNA, 20 nt, Artificial Sequence
  HTT spacer sequence TTCN PAM
auugaauguguacugcuuuu

SEQ ID NO: 32213 - RNA, 20 nt, Artificial Sequence
  HTT spacer sequence TTCN PAM
auggaaaccacacuucaaau

SEQ ID NO: 32214 - RNA, 20 nt, Artificial Sequence
  HTT spacer sequence TTCN PAM
acuaaaauuuuuugacuuga

SEQ ID NO: 32215 - RNA, 20 nt, Artificial Sequence
  HTT spacer sequence TTCN PAM
ggaggaacuuccauguacau

SEQ ID NO: 32216 - RNA, 20 nt, Artificial Sequence
  HTT spacer sequence TTCN PAM
uccugaaaauaaagaugguc

SEQ ID NO: 32217 - RNA, 20 nt, Artificial Sequence
  HTT spacer sequence TTCN PAM
auguacauugaugacggacg

SEQ ID NO: 32218 - RNA, 20 nt, Artificial Sequence
  HTT spacer sequence TTCN PAM
aucguccgucaucaauguac

SEQ ID NO: 32219 - RNA, 20 nt, Artificial Sequence
  HTT spacer sequence TTCN PAM
aucauccuaaugaacauaau

SEQ ID NO: 32220 - RNA, 20 nt, Artificial Sequence
  HTT spacer sequence TTCN PAM
uuaggaugauagaaacggau

SEQ ID NO: 32221 - RNA, 20 nt, Artificial Sequence
  HTT spacer sequence TTCN PAM
uuauguucauuaggaugaua

SEQ ID NO: 32222 - RNA, 20 nt, Artificial Sequence
  HTT spacer sequence TTCN PAM
gggcuggaagccagaagagg

SEQ ID NO: 32223 - RNA, 20 nt, Artificial Sequence
  HTT spacer sequence TTCN PAM
agccccgaaagcugcuuacu

SEQ ID NO: 32224 - RNA, 20 nt, Artificial Sequence
  HTT spacer sequence TTCN PAM
ggcuuccagccccgaaagcu

SEQ ID NO: 32225 - RNA, 20 nt, Artificial Sequence
  HTT spacer sequence TTCN PAM
gcuuugcggguauuugcuga

SEQ ID NO: 32226 - RNA, 20 nt, Artificial Sequence
  HTT spacer sequence TTCN PAM
agauaccuuguccagaucag

SEQ ID NO: 32227 - RNA, 20 nt, Artificial Sequence
  HTT spacer sequence TTCN PAM
agcgauucuccugccucagc

SEQ ID NO: 32228 - RNA, 20 nt, Artificial Sequence
  HTT spacer sequence TTCN PAM
ccugccucagccucccgagu

SEQ ID NO: 32229 - RNA, 20 nt, Artificial Sequence
  HTT spacer sequence TTCN PAM
ccauguuggccaggaugguc

SEQ ID NO: 32230 - RNA, 20 nt, Artificial Sequence
  HTT spacer sequence TTCN PAM
uuuuuaguccccuaugcuca

SEQ ID NO: 32231 - RNA, 20 nt, Artificial Sequence
  HTT spacer sequence TTCN PAM
uuuccacuuugggguccacu

SEQ ID NO: 32232 - RNA, 20 nt, Artificial Sequence
  HTT spacer sequence TTCN PAM
acuuugggguccacuuuggg

SEQ ID NO: 32233 - RNA, 20 nt, Artificial Sequence
  HTT spacer sequence TTCN PAM
ugggugggguggaccccaaa

SEQ ID NO: 32234 - RNA, 20 nt, Artificial Sequence
  HTT spacer sequence TTCN PAM
ucuugggugggguggacccc

SEQ ID NO: 32235 - RNA, 20 nt, Artificial Sequence
  HTT spacer sequence TTCN PAM
aagucauccuucuucuuggg

SEQ ID NO: 32236 - RNA, 20 nt, Artificial Sequence
  HTT spacer sequence TTCN PAM
gagcugguuuacuuccaagu

SEQ ID NO: 32237 - RNA, 20 nt, Artificial Sequence
  HTT spacer sequence TTCN PAM
uaucaaccacauccaguucc

SEQ ID NO: 32238 - RNA, 20 nt, Artificial Sequence
  HTT spacer sequence TTCN PAM
ucaaaacuggaacuuggauu

SEQ ID NO: 32239 - RNA, 20 nt, Artificial Sequence
  HTT spacer sequence TTCN PAM
aguuuugaggaacuggaugu

SEQ ID NO: 32240 - RNA, 20 nt, Artificial Sequence
  HTT spacer sequence TTCN PAM
agugucccaggagccuggca

SEQ ID NO: 32241 - RNA, 20 nt, Artificial Sequence
  HTT spacer sequence TTCN PAM
ggagaggauuuuuguuugca

SEQ ID NO: 32242 - RNA, 20 nt, Artificial Sequence
  HTT spacer sequence TTCN PAM
uccggagaggauuuuuguuu

SEQ ID NO: 32243 - RNA, 20 nt, Artificial Sequence
  HTT spacer sequence TTCN PAM
aaugacucucuaauaaauuu

SEQ ID NO: 32244 - RNA, 20 nt, Artificial Sequence
  HTT spacer sequence TTCN PAM
aauacaauguccagcacaca

SEQ ID NO: 32245 - RNA, 20 nt, Artificial Sequence
  HTT spacer sequence TTCN PAM
ugguaauuuguguuugugug

SEQ ID NO: 32246 - RNA, 20 nt, Artificial Sequence
  HTT spacer sequence TTCN PAM
cauccaucaggccucauauc

SEQ ID NO: 32247 - RNA, 20 nt, Artificial Sequence
  HTT spacer sequence TTCN PAM
gcuaauucccauccaucagg

SEQ ID NO: 32248 - RNA, 20 nt, Artificial Sequence
  HTT spacer sequence TTCN PAM
ggcaugagaaacauacccuc

SEQ ID NO: 32249 - RNA, 20 nt, Artificial Sequence
  HTT spacer sequence TTCN PAM
caugccugaaguuucugcua

SEQ ID NO: 32250 - RNA, 20 nt, Artificial Sequence
  HTT spacer sequence TTCN PAM
aggccucugaggguauguuu

SEQ ID NO: 32251 - RNA, 20 nt, Artificial Sequence
  HTT spacer sequence TTCN PAM
uaucuccauuaucuagacac

SEQ ID NO: 32252 - RNA, 20 nt, Artificial Sequence
  HTT spacer sequence TTCN PAM
cauguucaaagaggaaauuu

SEQ ID NO: 32253 - RNA, 20 nt, Artificial Sequence
  HTT spacer sequence TTCN PAM
aagaggaaauuugcaaaacu

SEQ ID NO: 32254 - RNA, 20 nt, Artificial Sequence
  HTT spacer sequence TTCN PAM
ucuuugaacaugggaaacau

SEQ ID NO: 32255 - RNA, 20 nt, Artificial Sequence
  HTT spacer sequence TTCN PAM
aguuuugcaaauuuccucuu

SEQ ID NO: 32256 - RNA, 20 nt, Artificial Sequence
  HTT spacer sequence TTCN PAM
ugccaacacuuucaaguuuu

SEQ ID NO: 32257 - RNA, 20 nt, Artificial Sequence
  HTT spacer sequence TTCN PAM
gauuuccugccaacacuuuc

SEQ ID NO: 32258 - RNA, 20 nt, Artificial Sequence
  HTT spacer sequence TTCN PAM
ggaccguaauuuauacugac

SEQ ID NO: 32259 - RNA, 20 nt, Artificial Sequence
  HTT spacer sequence TTCN PAM
gcaguuuucgggaccguaau

SEQ ID NO: 32260 - RNA, 20 nt, Artificial Sequence
  HTT spacer sequence TTCN PAM
agaacuuaaugguaaagcaa

SEQ ID NO: 32261 - RNA, 20 nt, Artificial Sequence
  HTT spacer sequence TTCN PAM
ggaauucugcaguuuucggg

SEQ ID NO: 32262 - RNA, 20 nt, Artificial Sequence
  HTT spacer sequence TTCN PAM
gcuguuaaacccuugcuuua

SEQ ID NO: 32263 - RNA, 20 nt, Artificial Sequence
  HTT spacer sequence TTCN PAM
auucugcuguuaaacccuug

SEQ ID NO: 32264 - RNA, 20 nt, Artificial Sequence
  HTT spacer sequence TTCN PAM
cucuggcuauuucuauucug

SEQ ID NO: 32265 - RNA, 20 nt, Artificial Sequence
  HTT spacer sequence TTCN PAM
uaguucucucuggcuauuuc

SEQ ID NO: 32266 - RNA, 20 nt, Artificial Sequence
  HTT spacer sequence TTCN PAM
ggguagugucaucugacuua

SEQ ID NO: 32267 - RNA, 20 nt, Artificial Sequence
  HTT spacer sequence TTCN PAM
uuggccucucagugccuuau

SEQ ID NO: 32268 - RNA, 20 nt, Artificial Sequence
  HTT spacer sequence TTCN PAM
auuccuuggccucucagugc

SEQ ID NO: 32269 - RNA, 20 nt, Artificial Sequence
  HTT spacer sequence TTCN PAM
gcauuuuccauuccuuggcc

SEQ ID NO: 32270 - RNA, 20 nt, Artificial Sequence
  HTT spacer sequence TTCN PAM
ucugcauuuuccauuccuug

SEQ ID NO: 32271 - RNA, 20 nt, Artificial Sequence
  HTT spacer sequence TTCN PAM
cucucucccugguacuccaa

SEQ ID NO: 32272 - RNA, 20 nt, Artificial Sequence
  HTT spacer sequence TTCN PAM
ccuucucucucucccuggua

SEQ ID NO: 32273 - RNA, 20 nt, Artificial Sequence
  HTT spacer sequence TTCN PAM
ucuccuucucucucucccug

SEQ ID NO: 32274 - RNA, 20 nt, Artificial Sequence
  HTT spacer sequence TTCN PAM
guucuucuccuucucucucu

SEQ ID NO: 32275 - RNA, 20 nt, Artificial Sequence
  HTT spacer sequence TTCN PAM
aggacggugacugagaggcu

SEQ ID NO: 32276 - RNA, 20 nt, Artificial Sequence
  HTT spacer sequence TTCN PAM
aaacugaugaaagccaucag

SEQ ID NO: 32277 - RNA, 20 nt, Artificial Sequence
  HTT spacer sequence TTCN PAM
aagccucucagucaccgucc

SEQ ID NO: 32278 - RNA, 20 nt, Artificial Sequence
  HTT spacer sequence TTCN PAM
ucaguuucgaagccucucag

SEQ ID NO: 32279 - RNA, 20 nt, Artificial Sequence
  HTT spacer sequence TTCN PAM
caaauucaaagcccagugaa

SEQ ID NO: 32280 - RNA, 20 nt, Artificial Sequence
  HTT spacer sequence TTCN PAM
aagcccagugaauuccaagg

SEQ ID NO: 32281 - RNA, 20 nt, Artificial Sequence
  HTT spacer sequence TTCN PAM
cugggcuuugaauuugugaa

SEQ ID NO: 32282 - RNA, 20 nt, Artificial Sequence
  HTT spacer sequence TTCN PAM
aaggagaaaaaaagaaaucc

SEQ ID NO: 32283 - RNA, 20 nt, Artificial Sequence
  HTT spacer sequence TTCN PAM
ccuuggaauucacugggcuu

SEQ ID NO: 32284 - RNA, 20 nt, Artificial Sequence
  HTT spacer sequence TTCN PAM
uuuuuucuccuuggaauuca

SEQ ID NO: 32285 - RNA, 20 nt, Artificial Sequence
  HTT spacer sequence TTCN PAM
caguauggauuucuuuuuuu

SEQ ID NO: 32286 - RNA, 20 nt, Artificial Sequence
  HTT spacer sequence TTCN PAM
gauaacccucugccucugag

SEQ ID NO: 32287 - RNA, 20 nt, Artificial Sequence
  HTT spacer sequence TTCN PAM
cucccaaguucucaucaucc

SEQ ID NO: 32288 - RNA, 20 nt, Artificial Sequence
  HTT spacer sequence TTCN PAM
caucaucccagggccaggga

SEQ ID NO: 32289 - RNA, 20 nt, Artificial Sequence
  HTT spacer sequence TTCN PAM
cuaggagagggaucuggcuu

SEQ ID NO: 32290 - RNA, 20 nt, Artificial Sequence
  HTT spacer sequence TTCN PAM
ugucauucuggguauuugua

SEQ ID NO: 32291 - RNA, 20 nt, Artificial Sequence
  HTT spacer sequence TTCN PAM
ggguauuuguagggaaauug

SEQ ID NO: 32292 - RNA, 20 nt, Artificial Sequence
  HTT spacer sequence TTCN PAM
cuacaaauacccagaaugac

SEQ ID NO: 32293 - RNA, 20 nt, Artificial Sequence
  HTT spacer sequence TTCN PAM
aauuucccuacaaauaccca

SEQ ID NO: 32294 - RNA, 20 nt, Artificial Sequence
  HTT spacer sequence TTCN PAM
cuuccaauuucccuacaaau

SEQ ID NO: 32295 - RNA, 20 nt, Artificial Sequence
  HTT spacer sequence TTCN PAM
ggcuguggggaaugucuuug

SEQ ID NO: 32296 - RNA, 20 nt, Artificial Sequence
  HTT spacer sequence TTCN PAM
ccacagccugaaaucuccca

SEQ ID NO: 32297 - RNA, 20 nt, Artificial Sequence
  HTT spacer sequence TTCN PAM
ccagcaaagacauuccccac

SEQ ID NO: 32298 - RNA, 20 nt, Artificial Sequence
  HTT spacer sequence TTCN PAM
uuucaccagcaaagacauuc

SEQ ID NO: 32299 - RNA, 20 nt, Artificial Sequence
  HTT spacer sequence TTCN PAM
aaggucaggauguucuuuuc

SEQ ID NO: 32300 - RNA, 20 nt, Artificial Sequence
  HTT spacer sequence TTCN PAM
ccgagggggaucugcguucc

SEQ ID NO: 32301 - RNA, 20 nt, Artificial Sequence
  HTT spacer sequence TTCN PAM
agaacuucuggagcugguau

SEQ ID NO: 32302 - RNA, 20 nt, Artificial Sequence
  HTT spacer sequence TTCN PAM
ggaacgcagaucccccucgg

SEQ ID NO: 32303 - RNA, 20 nt, Artificial Sequence
  HTT spacer sequence TTCN PAM
ggagcugguauagguaaggc

SEQ ID NO: 32304 - RNA, 20 nt, Artificial Sequence
  HTT spacer sequence TTCN PAM
uacugagccagccuguugcu

SEQ ID NO: 32305 - RNA, 20 nt, Artificial Sequence
  HTT spacer sequence TTCN PAM
guaguuuugcagugauacgu

SEQ ID NO: 32306 - RNA, 20 nt, Artificial Sequence
  HTT spacer sequence TTCN PAM
cugucuuugguuuucuguag

SEQ ID NO: 32307 - RNA, 20 nt, Artificial Sequence
  HTT spacer sequence TTCN PAM
aagcagcagccaugaaauug

SEQ ID NO: 32308 - RNA, 20 nt, Artificial Sequence
  HTT spacer sequence TTCN PAM
uggcugcugcuuugaaacua

SEQ ID NO: 32309 - RNA, 20 nt, Artificial Sequence
  HTT spacer sequence TTCN PAM
ugcuguugagacaucagcug

SEQ ID NO: 32310 - RNA, 20 nt, Artificial Sequence
  HTT spacer sequence TTCN PAM
uucuugcuguugagacauca

SEQ ID NO: 32311 - RNA, 20 nt, Artificial Sequence
  HTT spacer sequence TTCN PAM
acuuuucauucuugcuguug

SEQ ID NO: 32312 - RNA, 20 nt, Artificial Sequence
  HTT spacer sequence TTCN PAM
ccauguuagccaggaugguc

SEQ ID NO: 32313 - RNA, 20 nt, Artificial Sequence
  HTT spacer sequence TTCN PAM
ccugccucagccucccgagu

SEQ ID NO: 32314 - RNA, 20 nt, Artificial Sequence
  HTT spacer sequence TTCN PAM
cgccauucuccugccucagc

SEQ ID NO: 32315 - RNA, 20 nt, Artificial Sequence
  HTT spacer sequence TTCN PAM
ucacccuuuuuuuuuuuuuu

SEQ ID NO: 32316 - RNA, 20 nt, Artificial Sequence
  HTT spacer sequence TTCN PAM
aucuccugaaaggaagcaac

SEQ ID NO: 32317 - RNA, 20 nt, Artificial Sequence
  HTT spacer sequence TTCN PAM
ggagauugaagcuucgucac

SEQ ID NO: 32318 - RNA, 20 nt, Artificial Sequence
  HTT spacer sequence TTCN PAM
uuucaggagauugaagcuuc

SEQ ID NO: 32319 - RNA, 20 nt, Artificial Sequence
  HTT spacer sequence TTCN PAM
auacccaccaaaauccguga

SEQ ID NO: 32320 - RNA, 20 nt, Artificial Sequence
  HTT spacer sequence TTCN PAM
cggauuuugguggguaucga

SEQ ID NO: 32321 - RNA, 20 nt, Artificial Sequence
  HTT spacer sequence TTCN PAM
ucacggauuuugguggguau

SEQ ID NO: 32322 - RNA, 20 nt, Artificial Sequence
  HTT spacer sequence TTCN PAM
uucuucacggauuuuggugg

SEQ ID NO: 32323 - RNA, 20 nt, Artificial Sequence
  HTT spacer sequence TTCN PAM
ugauugaacuggaaagauuu

SEQ ID NO: 32324 - RNA, 20 nt, Artificial Sequence
  HTT spacer sequence TTCN PAM
aucaggaaguguuuuuauuu

SEQ ID NO: 32325 - RNA, 20 nt, Artificial Sequence
  HTT spacer sequence TTCN PAM
aguucaaucaggaaguguuu

SEQ ID NO: 32326 - RNA, 20 nt, Artificial Sequence
  HTT spacer sequence TTCN PAM
gcaauagaagacccacuguc

SEQ ID NO: 32327 - RNA, 20 nt, Artificial Sequence
  HTT spacer sequence TTCN PAM
auugcggaaaucuuuccagu

SEQ ID NO: 32328 - RNA, 20 nt, Artificial Sequence
  HTT spacer sequence TTCN PAM
uuggacagugggucuucuau

SEQ ID NO: 32329 - RNA, 20 nt, Artificial Sequence
  HTT spacer sequence TTCN PAM
aaaggaugcuuuccaggcag

SEQ ID NO: 32330 - RNA, 20 nt, Artificial Sequence
  HTT spacer sequence TTCN PAM
aggcagaagaaaaugacccc

SEQ ID NO: 32331 - RNA, 20 nt, Artificial Sequence
  HTT spacer sequence TTCN PAM
gccuggaaagcauccuuuag

SEQ ID NO: 32332 - RNA, 20 nt, Artificial Sequence
  HTT spacer sequence TTCN PAM
ucugccuggaaagcauccuu

SEQ ID NO: 32333 - RNA, 20 nt, Artificial Sequence
  HTT spacer sequence TTCN PAM
ucuggggucauuuucuucug

SEQ ID NO: 32334 - RNA, 20 nt, Artificial Sequence
  HTT spacer sequence TTCN PAM
ggaaagaaauggagagugau

SEQ ID NO: 32335 - RNA, 20 nt, Artificial Sequence
  HTT spacer sequence TTCN PAM
ugaaucucugaucuuccucu

SEQ ID NO: 32336 - RNA, 20 nt, Artificial Sequence
  HTT spacer sequence TTCN PAM
uuccugaaucucugaucuuc

SEQ ID NO: 32337 - RNA, 20 nt, Artificial Sequence
  HTT spacer sequence TTCN PAM
auuuuuaucacucuccauuu

SEQ ID NO: 32338 - RNA, 20 nt, Artificial Sequence
  HTT spacer sequence TTCN PAM
ggggccaauuuaaacaaaag

SEQ ID NO: 32339 - RNA, 20 nt, Artificial Sequence
  HTT spacer sequence TTCN PAM
cacucugucgcccaggcuac

SEQ ID NO: 32340 - RNA, 20 nt, Artificial Sequence
  HTT spacer sequence TTCN PAM
cuguagccugggcgacagag

SEQ ID NO: 32341 - RNA, 20 nt, Artificial Sequence
  HTT spacer sequence TTCN PAM
cuugccucagccuccugagu

SEQ ID NO: 32342 - RNA, 20 nt, Artificial Sequence
  HTT spacer sequence TTCN PAM
ccauguuggccaggcugguc

SEQ ID NO: 32343 - RNA, 20 nt, Artificial Sequence
  HTT spacer sequence TTCN PAM
agaccagccuggccaacaug

SEQ ID NO: 32344 - RNA, 20 nt, Artificial Sequence
  HTT spacer sequence TTCN PAM
auauaaacacacacauaggc

SEQ ID NO: 32345 - RNA, 20 nt, Artificial Sequence
  HTT spacer sequence TTCN PAM
cccaauuuggaggguauuau

SEQ ID NO: 32346 - RNA, 20 nt, Artificial Sequence
  HTT spacer sequence TTCN PAM
ugauuaugcagggagcuuac

SEQ ID NO: 32347 - RNA, 20 nt, Artificial Sequence
  HTT spacer sequence TTCN PAM
cuucuugauuaugcagggag

SEQ ID NO: 32348 - RNA, 20 nt, Artificial Sequence
  HTT spacer sequence TTCN PAM
uccuccagguaucaaaaucu

SEQ ID NO: 32349 - RNA, 20 nt, Artificial Sequence
  HTT spacer sequence TTCN PAM
agggugaccaugaaaagagg

SEQ ID NO: 32350 - RNA, 20 nt, Artificial Sequence
  HTT spacer sequence TTCN PAM
uggucacccuagaaauuaca

SEQ ID NO: 32351 - RNA, 20 nt, Artificial Sequence
  HTT spacer sequence TTCN PAM
ggccauccucccaccuaggc

SEQ ID NO: 32352 - RNA, 20 nt, Artificial Sequence
  HTT spacer sequence TTCN PAM
ccauguuggccaggcugguc

SEQ ID NO: 32353 - RNA, 20 nt, Artificial Sequence
  HTT spacer sequence TTCN PAM
agaccagccuggccaacaug

SEQ ID NO: 32354 - RNA, 20 nt, Artificial Sequence
  HTT spacer sequence TTCN PAM
aacuaacagagguucaaaaa

SEQ ID NO: 32355 - RNA, 20 nt, Artificial Sequence
  HTT spacer sequence TTCN PAM
aaaauaaaaucagacuuaac

SEQ ID NO: 32356 - RNA, 20 nt, Artificial Sequence
  HTT spacer sequence TTCN PAM
guauauccuaccagcucugu

SEQ ID NO: 32357 - RNA, 20 nt, Artificial Sequence
  HTT spacer sequence TTCN PAM
uuaauauuaacuguaaucgu

SEQ ID NO: 32358 - RNA, 20 nt, Artificial Sequence
  HTT spacer sequence TTCN PAM
uucauuaauauuaacuguaa

SEQ ID NO: 32359 - RNA, 20 nt, Artificial Sequence
  HTT spacer sequence TTCN PAM
uauguggggucuuugacaac

SEQ ID NO: 32360 - RNA, 20 nt, Artificial Sequence
  HTT spacer sequence TTCN PAM
aggugcaccgcugguaagga

SEQ ID NO: 32361 - RNA, 20 nt, Artificial Sequence
  HTT spacer sequence TTCN PAM
uuagguucuaggugcaccgc

SEQ ID NO: 32362 - RNA, 20 nt, Artificial Sequence
  HTT spacer sequence TTCN PAM
ucuguccuguuuccuuaggu

SEQ ID NO: 32363 - RNA, 20 nt, Artificial Sequence
  HTT spacer sequence TTCN PAM
cgucucauaggauggcugag

SEQ ID NO: 32364 - RNA, 20 nt, Artificial Sequence
  HTT spacer sequence TTCN PAM
gucugcagcugggcccgugc

SEQ ID NO: 32365 - RNA, 20 nt, Artificial Sequence
  HTT spacer sequence TTCN PAM
ucucuggaagguuccugccu

SEQ ID NO: 32366 - RNA, 20 nt, Artificial Sequence
  HTT spacer sequence TTCN PAM
cuggaagguuccugccuguu

SEQ ID NO: 32367 - RNA, 20 nt, Artificial Sequence
  HTT spacer sequence TTCN PAM
agagaagaaagccaggagcu

SEQ ID NO: 32368 - RNA, 20 nt, Artificial Sequence
  HTT spacer sequence TTCN PAM
ugccuguuuugcccucacac

SEQ ID NO: 32369 - RNA, 20 nt, Artificial Sequence
  HTT spacer sequence TTCN PAM
cccuggggucugcgucaggg

SEQ ID NO: 32370 - RNA, 20 nt, Artificial Sequence
  HTT spacer sequence TTCN PAM
uucuuuuccagccccacccc

SEQ ID NO: 32371 - RNA, 20 nt, Artificial Sequence
  HTT spacer sequence TTCN PAM
uuuccagccccaccccgcgu

SEQ ID NO: 32372 - RNA, 20 nt, Artificial Sequence
  HTT spacer sequence TTCN PAM
agccccaccccgcgugcauc

SEQ ID NO: 32373 - RNA, 20 nt, Artificial Sequence
  HTT spacer sequence TTCN PAM
aggccucuucucucuucucg

SEQ ID NO: 32374 - RNA, 20 nt, Artificial Sequence
  HTT spacer sequence TTCN PAM
cucuucucggcaggacaggc

SEQ ID NO: 32375 - RNA, 20 nt, Artificial Sequence
  HTT spacer sequence TTCN PAM
cggcaggacaggcacaggca

SEQ ID NO: 32376 - RNA, 20 nt, Artificial Sequence
  HTT spacer sequence TTCN PAM
uucauuuaacaaucuucccc

SEQ ID NO: 32377 - RNA, 20 nt, Artificial Sequence
  HTT spacer sequence TTCN PAM
uuuaacaaucuuccccugaa

SEQ ID NO: 32378 - RNA, 20 nt, Artificial Sequence
  HTT spacer sequence TTCN PAM
ccugaauaguucauguucau

SEQ ID NO: 32379 - RNA, 20 nt, Artificial Sequence
  HTT spacer sequence TTCN PAM
ggggaagauuguuaaaugaa

SEQ ID NO: 32380 - RNA, 20 nt, Artificial Sequence
  HTT spacer sequence TTCN PAM
uguucauugcugaaaauuug

SEQ ID NO: 32381 - RNA, 20 nt, Artificial Sequence
  HTT spacer sequence TTCN PAM
uugcugaaaauuugaaaaau

SEQ ID NO: 32382 - RNA, 20 nt, Artificial Sequence
  HTT spacer sequence TTCN PAM
gcaaugaacaugaacuauuc

SEQ ID NO: 32383 - RNA, 20 nt, Artificial Sequence
  HTT spacer sequence TTCN PAM
aauuuucagcaaugaacaug

SEQ ID NO: 32384 - RNA, 20 nt, Artificial Sequence
  HTT spacer sequence TTCN PAM
auauuuuucaaauuuucagc

SEQ ID NO: 32385 - RNA, 20 nt, Artificial Sequence
  HTT spacer sequence TTCN PAM
ccugcccagagagagucacu

SEQ ID NO: 32386 - RNA, 20 nt, Artificial Sequence
  HTT spacer sequence TTCN PAM
uagucaccaagucauagcag

SEQ ID NO: 32387 - RNA, 20 nt, Artificial Sequence
  HTT spacer sequence TTCN PAM
cucucgcucuuuuuuuuuuu

SEQ ID NO: 32388 - RNA, 20 nt, Artificial Sequence
  HTT spacer sequence TTCN PAM
agcgauucuccugccucagc

SEQ ID NO: 32389 - RNA, 20 nt, Artificial Sequence
  HTT spacer sequence TTCN PAM
ccugccucagccucuugagu

SEQ ID NO: 32390 - RNA, 20 nt, Artificial Sequence
  HTT spacer sequence TTCN PAM
ucuuguuggucaggcggacu

SEQ ID NO: 32391 - RNA, 20 nt, Artificial Sequence
  HTT spacer sequence TTCN PAM
aguccgccugaccaacaaga

SEQ ID NO: 32392 - RNA, 20 nt, Artificial Sequence
  HTT spacer sequence TTCN PAM
ucucucuucuguguaugugu

SEQ ID NO: 32393 - RNA, 20 nt, Artificial Sequence
  HTT spacer sequence TTCN PAM
guguauguguacgcuguuuu

SEQ ID NO: 32394 - RNA, 20 nt, Artificial Sequence
  HTT spacer sequence TTCN PAM
uuagaaugggggacguuauc

SEQ ID NO: 32395 - RNA, 20 nt, Artificial Sequence
  HTT spacer sequence TTCN PAM
aaagaaaaaacagcguacac

SEQ ID NO: 32396 - RNA, 20 nt, Artificial Sequence
  HTT spacer sequence TTCN PAM
cugugucacaagugcucauc

SEQ ID NO: 32397 - RNA, 20 nt, Artificial Sequence
  HTT spacer sequence TTCN PAM
agaugagcacuugugacaca

SEQ ID NO: 32398 - RNA, 20 nt, Artificial Sequence
  HTT spacer sequence TTCN PAM
aaugacugccuguggcuaug

SEQ ID NO: 32399 - RNA, 20 nt, Artificial Sequence
  HTT spacer sequence TTCN PAM
uuuaacucagcuccuucugc

SEQ ID NO: 32400 - RNA, 20 nt, Artificial Sequence
  HTT spacer sequence TTCN PAM
gcccagcaucuaucuuuuuu

SEQ ID NO: 32401 - RNA, 20 nt, Artificial Sequence
  HTT spacer sequence TTCN PAM
aucuuuuguccuaaguguug

SEQ ID NO: 32402 - RNA, 20 nt, Artificial Sequence
  HTT spacer sequence TTCN PAM
cguaauuuauccuaugcaaa

SEQ ID NO: 32403 - RNA, 20 nt, Artificial Sequence
  HTT spacer sequence TTCN PAM
gggacugugcccauuuuuag

SEQ ID NO: 32404 - RNA, 20 nt, Artificial Sequence
  HTT spacer sequence TTCN PAM
gugaacuuuaaaaaccugug

SEQ ID NO: 32405 - RNA, 20 nt, Artificial Sequence
  HTT spacer sequence TTCN PAM
cagaaaaguuuggcaucauc

SEQ ID NO: 32406 - RNA, 20 nt, Artificial Sequence
  HTT spacer sequence TTCN PAM
guaagucuuucacauuagau

SEQ ID NO: 32407 - RNA, 20 nt, Artificial Sequence
  HTT spacer sequence TTCN PAM
cauuagauuuccugucagga

SEQ ID NO: 32408 - RNA, 20 nt, Artificial Sequence
  HTT spacer sequence TTCN PAM
ugucaggaugauagucaauu

SEQ ID NO: 32409 - RNA, 20 nt, Artificial Sequence
  HTT spacer sequence TTCN PAM
aggcagaugauguuuucuca

SEQ ID NO: 32410 - RNA, 20 nt, Artificial Sequence
  HTT spacer sequence TTCN PAM
cagccauggcugaagcaguu

SEQ ID NO: 32411 - RNA, 20 nt, Artificial Sequence
  HTT spacer sequence TTCN PAM
gccauggcugagaaaacauc

SEQ ID NO: 32412 - RNA, 20 nt, Artificial Sequence
  HTT spacer sequence TTCN PAM
aacccauccagggaggcaau

SEQ ID NO: 32413 - RNA, 20 nt, Artificial Sequence
  HTT spacer sequence TTCN PAM
guuauaugcucccaaaccaa

SEQ ID NO: 32414 - RNA, 20 nt, Artificial Sequence
  HTT spacer sequence TTCN PAM
gucugagcugcugugacucc

SEQ ID NO: 32415 - RNA, 20 nt, Artificial Sequence
  HTT spacer sequence TTCN PAM
cccuuacagaugaaagaauu

SEQ ID NO: 32416 - RNA, 20 nt, Artificial Sequence
  HTT spacer sequence TTCN PAM
ucuguaagggagaaauacac

SEQ ID NO: 32417 - RNA, 20 nt, Artificial Sequence
  HTT spacer sequence TTCN PAM
uucaucuguaagggagaaau

SEQ ID NO: 32418 - RNA, 20 nt, Artificial Sequence
  HTT spacer sequence TTCN PAM
aggccaggcuggaaugacaa

SEQ ID NO: 32419 - RNA, 20 nt, Artificial Sequence
  HTT spacer sequence TTCN PAM
agccuggccuggaauucuuu

SEQ ID NO: 32420 - RNA, 20 nt, Artificial Sequence
  HTT spacer sequence TTCN PAM
agcucccaucaccccaggau

SEQ ID NO: 32421 - RNA, 20 nt, Artificial Sequence
  HTT spacer sequence TTCN PAM
agggagcaggaaaaaggugu

SEQ ID NO: 32422 - RNA, 20 nt, Artificial Sequence
  HTT spacer sequence TTCN PAM
ugcucccuggaaugggaugu

SEQ ID NO: 32423 - RNA, 20 nt, Artificial Sequence
  HTT spacer sequence TTCN PAM
cuucauuuuaugugauuccu

SEQ ID NO: 32424 - RNA, 20 nt, Artificial Sequence
  HTT spacer sequence TTCN PAM
uuuuaugugauuccuuucua

SEQ ID NO: 32425 - RNA, 20 nt, Artificial Sequence
  HTT spacer sequence TTCN PAM
uuucuagaaguacuacucau

SEQ ID NO: 32426 - RNA, 20 nt, Artificial Sequence
  HTT spacer sequence TTCN PAM
agaaguacuacucauuacuu

SEQ ID NO: 32427 - RNA, 20 nt, Artificial Sequence
  HTT spacer sequence TTCN PAM
agaaaggaaucacauaaaau

SEQ ID NO: 32428 - RNA, 20 nt, Artificial Sequence
  HTT spacer sequence TTCN PAM
gcuugcaucucccuggcuag

SEQ ID NO: 32429 - RNA, 20 nt, Artificial Sequence
  HTT spacer sequence TTCN PAM
gcuagcuauggccauauaac

SEQ ID NO: 32430 - RNA, 20 nt, Artificial Sequence
  HTT spacer sequence TTCN PAM
uucagcuagcuauggccaua

SEQ ID NO: 32431 - RNA, 20 nt, Artificial Sequence
  HTT spacer sequence TTCN PAM
uuagagaccuuuuuaucuaa

SEQ ID NO: 32432 - RNA, 20 nt, Artificial Sequence
  HTT spacer sequence TTCN PAM
ucccauaacaauaaguaaua

SEQ ID NO: 32433 - RNA, 20 nt, Artificial Sequence
  HTT spacer sequence TTCN PAM
gguugauguccuaagcccca

SEQ ID NO: 32434 - RNA, 20 nt, Artificial Sequence
  HTT spacer sequence TTCN PAM
ggggcuuaggacaucaaccu

SEQ ID NO: 32435 - RNA, 20 nt, Artificial Sequence
  HTT spacer sequence TTCN PAM
gagguucuggggcuuaggac

SEQ ID NO: 32436 - RNA, 20 nt, Artificial Sequence
  HTT spacer sequence TTCN PAM
uuaaggagguaaggaggcua

SEQ ID NO: 32437 - RNA, 20 nt, Artificial Sequence
  HTT spacer sequence TTCN PAM
uguaagacaucagucggauu

SEQ ID NO: 32438 - RNA, 20 nt, Artificial Sequence
  HTT spacer sequence TTCN PAM
ugguguccucacguggccgu

SEQ ID NO: 32439 - RNA, 20 nt, Artificial Sequence
  HTT spacer sequence TTCN PAM
ccugagcccuguccuugacu

SEQ ID NO: 32440 - RNA, 20 nt, Artificial Sequence
  HTT spacer sequence TTCN PAM
ucucggacuucuagccucua

SEQ ID NO: 32441 - RNA, 20 nt, Artificial Sequence
  HTT spacer sequence TTCN PAM
agccucuaggaccaugagaa

SEQ ID NO: 32442 - RNA, 20 nt, Artificial Sequence
  HTT spacer sequence TTCN PAM
caugguccuagaggcuagaa

SEQ ID NO: 32443 - RNA, 20 nt, Artificial Sequence
  HTT spacer sequence TTCN PAM
guuguuuaagcugcccgguc

SEQ ID NO: 32444 - RNA, 20 nt, Artificial Sequence
  HTT spacer sequence TTCN PAM
agcagcagaugacuguauuu

SEQ ID NO: 32445 - RNA, 20 nt, Artificial Sequence
  HTT spacer sequence TTCN PAM
gugggucaggaauuuggacc

SEQ ID NO: 32446 - RNA, 20 nt, Artificial Sequence
  HTT spacer sequence TTCN PAM
ugacccacagaacgugugac

SEQ ID NO: 32447 - RNA, 20 nt, Artificial Sequence
  HTT spacer sequence TTCN PAM
cgccaggguucagucaaaua

SEQ ID NO: 32448 - RNA, 20 nt, Artificial Sequence
  HTT spacer sequence TTCN PAM
gucaaauaccagcugccucc

SEQ ID NO: 32449 - RNA, 20 nt, Artificial Sequence
  HTT spacer sequence TTCN PAM
ccggcugagcucucaggugg

SEQ ID NO: 32450 - RNA, 20 nt, Artificial Sequence
  HTT spacer sequence TTCN PAM
aaucucacgugguguuggca

SEQ ID NO: 32451 - RNA, 20 nt, Artificial Sequence
  HTT spacer sequence TTCN PAM
ucauggccugcuggacugag

SEQ ID NO: 32452 - RNA, 20 nt, Artificial Sequence
  HTT spacer sequence TTCN PAM
caguccagcaggccaugagg

SEQ ID NO: 32453 - RNA, 20 nt, Artificial Sequence
  HTT spacer sequence TTCN PAM
cacugccuguuggccagagg

SEQ ID NO: 32454 - RNA, 20 nt, Artificial Sequence
  HTT spacer sequence TTCN PAM
ucagagcauccaugccaaga

SEQ ID NO: 32455 - RNA, 20 nt, Artificial Sequence
  HTT spacer sequence TTCN PAM
uggcauggaugcucugauga

SEQ ID NO: 32456 - RNA, 20 nt, Artificial Sequence
  HTT spacer sequence TTCN PAM
gucucccuggcccucucugu

SEQ ID NO: 32457 - RNA, 20 nt, Artificial Sequence
  HTT spacer sequence TTCN PAM
aucaccuuugcccauugguu

SEQ ID NO: 32458 - RNA, 20 nt, Artificial Sequence
  HTT spacer sequence TTCN PAM
aaccaaugggcaaaggugau

SEQ ID NO: 32459 - RNA, 20 nt, Artificial Sequence
  HTT spacer sequence TTCN PAM
cugcuguuaauaagggccuu

SEQ ID NO: 32460 - RNA, 20 nt, Artificial Sequence
  HTT spacer sequence TTCN PAM
caguucucugcuguuaauaa

SEQ ID NO: 32461 - RNA, 20 nt, Artificial Sequence
  HTT spacer sequence TTCN PAM
agcaauucugccucagccuc

SEQ ID NO: 32462 - RNA, 20 nt, Artificial Sequence
  HTT spacer sequence TTCN PAM
gccucagccuccggaauagc

SEQ ID NO: 32463 - RNA, 20 nt, Artificial Sequence
  HTT spacer sequence TTCN PAM
ggaggcugaggcagaauugc

SEQ ID NO: 32464 - RNA, 20 nt, Artificial Sequence
  HTT spacer sequence TTCN PAM
ccauguuggccaggcugguc

SEQ ID NO: 32465 - RNA, 20 nt, Artificial Sequence
  HTT spacer sequence TTCN PAM
agaccagccuggccaacaug

SEQ ID NO: 32466 - RNA, 20 nt, Artificial Sequence
  HTT spacer sequence TTCN PAM
agcgaggugcgguggcucac

SEQ ID NO: 32467 - RNA, 20 nt, Artificial Sequence
  HTT spacer sequence TTCN PAM
uggguucaggugauccuccc

SEQ ID NO: 32468 - RNA, 20 nt, Artificial Sequence
  HTT spacer sequence TTCN PAM
ggugauccucccacaucagc

SEQ ID NO: 32469 - RNA, 20 nt, Artificial Sequence
  HTT spacer sequence TTCN PAM
ugggaggcugaugugggagg

SEQ ID NO: 32470 - RNA, 20 nt, Artificial Sequence
  HTT spacer sequence TTCN PAM
caguucuugggaggcugaug

SEQ ID NO: 32471 - RNA, 20 nt, Artificial Sequence
  HTT spacer sequence TTCN PAM
cugcuguccuucucaagaaa

SEQ ID NO: 32472 - RNA, 20 nt, Artificial Sequence
  HTT spacer sequence TTCN PAM
caagaaaagggaggcuacug

SEQ ID NO: 32473 - RNA, 20 nt, Artificial Sequence
  HTT spacer sequence TTCN PAM
ugagaaggacagcagagaaa

SEQ ID NO: 32474 - RNA, 20 nt, Artificial Sequence
  HTT spacer sequence TTCN PAM
cuuuaggacaggcucugaga

SEQ ID NO: 32475 - RNA, 20 nt, Artificial Sequence
  HTT spacer sequence TTCN PAM
gcagcagcucagcagagguc

SEQ ID NO: 32476 - RNA, 20 nt, Artificial Sequence
  HTT spacer sequence TTCN PAM
ggcaggacccccaaggggcg

SEQ ID NO: 32477 - RNA, 20 nt, Artificial Sequence
  HTT spacer sequence TTCN PAM
uuaugggagugcaccccugc

SEQ ID NO: 32478 - RNA, 20 nt, Artificial Sequence
  HTT spacer sequence TTCN PAM
ugugggcggcaucuuguggc

SEQ ID NO: 32479 - RNA, 20 nt, Artificial Sequence
  HTT spacer sequence TTCN PAM
cgcugcacuaaucacagugc

SEQ ID NO: 32480 - RNA, 20 nt, Artificial Sequence
  HTT spacer sequence TTCN PAM
ggggcgcugcgcugggaccg

SEQ ID NO: 32481 - RNA, 20 nt, Artificial Sequence
  HTT spacer sequence TTCN PAM
cugcgcucugcgcaggagcu

SEQ ID NO: 32482 - RNA, 20 nt, Artificial Sequence
  HTT spacer sequence TTCN PAM
gcaugggccugcgcccgcgc

SEQ ID NO: 32483 - RNA, 20 nt, Artificial Sequence
  HTT spacer sequence TTCN PAM
ugggcgagccccuccauggc

SEQ ID NO: 32484 - RNA, 20 nt, Artificial Sequence
  HTT spacer sequence TTCN PAM
ugccccgcccccagccuccc

SEQ ID NO: 32485 - RNA, 20 nt, Artificial Sequence
  HTT spacer sequence TTCN PAM
ucgucccgccucgccgcgac

SEQ ID NO: 32486 - RNA, 20 nt, Artificial Sequence
  HTT spacer sequence TTCN PAM
cacacagcuucgccucaccc

SEQ ID NO: 32487 - RNA, 20 nt, Artificial Sequence
  HTT spacer sequence TTCN PAM
ccucaccccauuacagucuc

SEQ ID NO: 32488 - RNA, 20 nt, Artificial Sequence
  HTT spacer sequence TTCN PAM
cccggguggggcgcugcgcu

SEQ ID NO: 32489 - RNA, 20 nt, Artificial Sequence
  HTT spacer sequence TTCN PAM
gccucacacagcaaggccgc

SEQ ID NO: 32490 - RNA, 20 nt, Artificial Sequence
  HTT spacer sequence TTCN PAM
cuggccagccauuggcagag

SEQ ID NO: 32491 - RNA, 20 nt, Artificial Sequence
  HTT spacer sequence TTCN PAM
gcuuuuaccugcggcccaga

SEQ ID NO: 32492 - RNA, 20 nt, Artificial Sequence
  HTT spacer sequence TTCN PAM
uugccccggugcugagcggc

SEQ ID NO: 32493 - RNA, 20 nt, Artificial Sequence
  HTT spacer sequence TTCN PAM
agggucgccauggcggucuc

SEQ ID NO: 32494 - RNA, 20 nt, Artificial Sequence
  HTT spacer sequence TTCN PAM
ucagcuuuuccagggucgcc

SEQ ID NO: 32495 - RNA, 20 nt, Artificial Sequence
  HTT spacer sequence TTCN PAM
agucccucaaguccuuccag

SEQ ID NO: 32496 - RNA, 20 nt, Artificial Sequence
  HTT spacer sequence TTCN PAM
agcagcagcagcagcagcag

SEQ ID NO: 32497 - RNA, 20 nt, Artificial Sequence
  HTT spacer sequence TTCN PAM
ucagccgccgccgcaggcac

SEQ ID NO: 32498 - RNA, 20 nt, Artificial Sequence
  HTT spacer sequence TTCN PAM
ugucgccggcccgcaggcug

SEQ ID NO: 32499 - RNA, 20 nt, Artificial Sequence
  HTT spacer sequence TTCN PAM
cccacuucagccccgcuccc

SEQ ID NO: 32500 - RNA, 20 nt, Artificial Sequence
  HTT spacer sequence TTCN PAM
gccccgcucccucacuuggg

SEQ ID NO: 32501 - RNA, 20 nt, Artificial Sequence
  HTT spacer sequence TTCN PAM
cuuguccucucgcgagggga

SEQ ID NO: 32502 - RNA, 20 nt, Artificial Sequence
  HTT spacer sequence TTCN PAM
ggacaggccccaacaaggcu

SEQ ID NO: 32503 - RNA, 20 nt, Artificial Sequence
  HTT spacer sequence TTCN PAM
ccgaggggagucacggccuc

SEQ ID NO: 32504 - RNA, 20 nt, Artificial Sequence
  HTT spacer sequence TTCN PAM
caggaugcgaagaguugggg

SEQ ID NO: 32505 - RNA, 20 nt, Artificial Sequence
  HTT spacer sequence TTCN PAM
cauccugcgaagggcgagag

SEQ ID NO: 32506 - RNA, 20 nt, Artificial Sequence
  HTT spacer sequence TTCN PAM
cgccccaacucuucgcaucc

SEQ ID NO: 32507 - RNA, 20 nt, Artificial Sequence
  HTT spacer sequence TTCN PAM
uuuuauuugcgagaaaccag

SEQ ID NO: 32508 - RNA, 20 nt, Artificial Sequence
  HTT spacer sequence TTCN PAM
cgcaaauaaaaagaaacaag

SEQ ID NO: 32509 - RNA, 20 nt, Artificial Sequence
  HTT spacer sequence TTCN PAM
uuuaacugcguugugaagag

SEQ ID NO: 32510 - RNA, 20 nt, Artificial Sequence
  HTT spacer sequence TTCN PAM
caacgcaguuaaaagaaccc

SEQ ID NO: 32511 - RNA, 20 nt, Artificial Sequence
  HTT spacer sequence TTCN PAM
cuucacaacgcaguuaaaag

SEQ ID NO: 32512 - RNA, 20 nt, Artificial Sequence
  HTT spacer sequence TTCN PAM
cucuucuagucugagaggga

SEQ ID NO: 32513 - RNA, 20 nt, Artificial Sequence
  HTT spacer sequence TTCN PAM
agucugagagggaagagggc

SEQ ID NO: 32514 - RNA, 20 nt, Artificial Sequence
  HTT spacer sequence TTCN PAM
cucucagacuagaagaggga

SEQ ID NO: 32515 - RNA, 20 nt, Artificial Sequence
  HTT spacer sequence TTCN PAM
agaggaggcgggguuuggag

SEQ ID NO: 32516 - RNA, 20 nt, Artificial Sequence
  HTT spacer sequence TTCN PAM
uuuccuaguggcacuuaaaa

SEQ ID NO: 32517 - RNA, 20 nt, Artificial Sequence
  HTT spacer sequence TTCN PAM
uaguggcacuuaaaacagcc

SEQ ID NO: 32518 - RNA, 20 nt, Artificial Sequence
  HTT spacer sequence TTCN PAM
uacauugucaggacauuuca

SEQ ID NO: 32519 - RNA, 20 nt, Artificial Sequence
  HTT spacer sequence TTCN PAM
uuuaguucaugaucacggug

SEQ ID NO: 32520 - RNA, 20 nt, Artificial Sequence
  HTT spacer sequence TTCN PAM
ugaucacggugguaguaaca

SEQ ID NO: 32521 - RNA, 20 nt, Artificial Sequence
  HTT spacer sequence TTCN PAM
aacgccugcagaccaacuua

SEQ ID NO: 32522 - RNA, 20 nt, Artificial Sequence
  HTT spacer sequence TTCN PAM
ccacuuuacuuggcaaccac

SEQ ID NO: 32523 - RNA, 20 nt, Artificial Sequence
  HTT spacer sequence TTCN PAM
uuaaucaccacguaaguuca

SEQ ID NO: 32524 - RNA, 20 nt, Artificial Sequence
  HTT spacer sequence TTCN PAM
uaauauuuaagauaauuuca

SEQ ID NO: 32525 - RNA, 20 nt, Artificial Sequence
  HTT spacer sequence TTCN PAM
aucaacucuuccuaauauuu

SEQ ID NO: 32526 - RNA, 20 nt, Artificial Sequence
  HTT spacer sequence TTCN PAM
caacacacauaggcaaaaaa

SEQ ID NO: 32527 - RNA, 20 nt, Artificial Sequence
  HTT spacer sequence TTCN PAM
ucccucggcaauuaaccucc

SEQ ID NO: 32528 - RNA, 20 nt, Artificial Sequence
  HTT spacer sequence TTCN PAM
agucaggcuugccagaauac

SEQ ID NO: 32529 - RNA, 20 nt, Artificial Sequence
  HTT spacer sequence TTCN PAM
ggcaagccugacuggaauac

SEQ ID NO: 32530 - RNA, 20 nt, Artificial Sequence
  HTT spacer sequence TTCN PAM
cuggcacaucugagaugccc

SEQ ID NO: 32531 - RNA, 20 nt, Artificial Sequence
  HTT spacer sequence TTCN PAM
guuugcuucauugcugacag

SEQ ID NO: 32532 - RNA, 20 nt, Artificial Sequence
  HTT spacer sequence TTCN PAM
uugcugacagcuuguuacuu

SEQ ID NO: 32533 - RNA, 20 nt, Artificial Sequence
  HTT spacer sequence TTCN PAM
aaaaaguaacaagcugucag

SEQ ID NO: 32534 - RNA, 20 nt, Artificial Sequence
  HTT spacer sequence TTCN PAM
guugcuuguucuuggggaga

SEQ ID NO: 32535 - RNA, 20 nt, Artificial Sequence
  HTT spacer sequence TTCN PAM
uggggagaauuuuugaaaca

SEQ ID NO: 32536 - RNA, 20 nt, Artificial Sequence
  HTT spacer sequence TTCN PAM
ccccaagaacaagcaacaga

SEQ ID NO: 32537 - RNA, 20 nt, Artificial Sequence
  HTT spacer sequence TTCN PAM
aaaauucuccccaagaacaa

SEQ ID NO: 32538 - RNA, 20 nt, Artificial Sequence
  HTT spacer sequence TTCN PAM
uguuucaaaaauucucccca

SEQ ID NO: 32539 - RNA, 20 nt, Artificial Sequence
  HTT spacer sequence TTCN PAM
gcuagauguuuuaauggucu

SEQ ID NO: 32540 - RNA, 20 nt, Artificial Sequence
  HTT spacer sequence TTCN PAM
cuggaagucugugugucgag

SEQ ID NO: 32541 - RNA, 20 nt, Artificial Sequence
  HTT spacer sequence TTCN PAM
agggaaaguccugggguucc

SEQ ID NO: 32542 - RNA, 20 nt, Artificial Sequence
  HTT spacer sequence TTCN PAM
uaacuccuacuguacacucg

SEQ ID NO: 32543 - RNA, 20 nt, Artificial Sequence
  HTT spacer sequence TTCN PAM
ggccuuucucuuaccucuca

SEQ ID NO: 32544 - RNA, 20 nt, Artificial Sequence
  HTT spacer sequence TTCN PAM
cuuaccucucaguauucuau

SEQ ID NO: 32545 - RNA, 20 nt, Artificial Sequence
  HTT spacer sequence TTCN PAM
auuuccgaucuggauguguc

SEQ ID NO: 32546 - RNA, 20 nt, Artificial Sequence
  HTT spacer sequence TTCN PAM
gaucuggaugugucccagau

SEQ ID NO: 32547 - RNA, 20 nt, Artificial Sequence
  HTT spacer sequence TTCN PAM
uaccaaaugccaucugggac

SEQ ID NO: 32548 - RNA, 20 nt, Artificial Sequence
  HTT spacer sequence TTCN PAM
uguucuuuguuucuguuaug

SEQ ID NO: 32549 - RNA, 20 nt, Artificial Sequence
  HTT spacer sequence TTCN PAM
uuguuucuguuaugauccuu

SEQ ID NO: 32550 - RNA, 20 nt, Artificial Sequence
  HTT spacer sequence TTCN PAM
guuaugauccuugucucguc

SEQ ID NO: 32551 - RNA, 20 nt, Artificial Sequence
  HTT spacer sequence TTCN PAM
aaguuuaauuagaaaaugau

SEQ ID NO: 32552 - RNA, 20 nt, Artificial Sequence
  HTT spacer sequence TTCN PAM
aauuaaacuuugaagacgag

SEQ ID NO: 32553 - RNA, 20 nt, Artificial Sequence
  HTT spacer sequence TTCN PAM
gagagcaguguuagcuuauu

SEQ ID NO: 32554 - RNA, 20 nt, Artificial Sequence
  HTT spacer sequence TTCN PAM
aacaaauaagcuaacacugc

SEQ ID NO: 32555 - RNA, 20 nt, Artificial Sequence
  HTT spacer sequence TTCN PAM
uaaauuuuauuccaacaaau

SEQ ID NO: 32556 - RNA, 20 nt, Artificial Sequence
  HTT spacer sequence TTCN PAM
aaaggauggaaaaacuuuuu

SEQ ID NO: 32557 - RNA, 20 nt, Artificial Sequence
  HTT spacer sequence TTCN PAM
auccuuuagaauaauuuauu

SEQ ID NO: 32558 - RNA, 20 nt, Artificial Sequence
  HTT spacer sequence TTCN PAM
ccaaauauccaaaaaguuuu

SEQ ID NO: 32559 - RNA, 20 nt, Artificial Sequence
  HTT spacer sequence TTCN PAM
guaaguaauuucucauccag

SEQ ID NO: 32560 - RNA, 20 nt, Artificial Sequence
  HTT spacer sequence TTCN PAM
cauccagaaauuuacuguag

SEQ ID NO: 32561 - RNA, 20 nt, Artificial Sequence
  HTT spacer sequence TTCN PAM
ggaugagaaauuacuuacug

SEQ ID NO: 32562 - RNA, 20 nt, Artificial Sequence
  HTT spacer sequence TTCN PAM
aggagguaggugucauaaaa

SEQ ID NO: 32563 - RNA, 20 nt, Artificial Sequence
  HTT spacer sequence TTCN PAM
cacauugcauguaucuugug

SEQ ID NO: 32564 - RNA, 20 nt, Artificial Sequence
  HTT spacer sequence TTCN PAM
caucaggagcccuguuuagu

SEQ ID NO: 32565 - RNA, 20 nt, Artificial Sequence
  HTT spacer sequence TTCN PAM
uucccaucaggagcccuguu

SEQ ID NO: 32566 - RNA, 20 nt, Artificial Sequence
  HTT spacer sequence TTCN PAM
gcugggcugcuucagacacu

SEQ ID NO: 32567 - RNA, 20 nt, Artificial Sequence
  HTT spacer sequence TTCN PAM
gacacuugaucauucuaaaa

SEQ ID NO: 32568 - RNA, 20 nt, Artificial Sequence
  HTT spacer sequence TTCN PAM
aaaaauaugccuucucuuuc

SEQ ID NO: 32569 - RNA, 20 nt, Artificial Sequence
  HTT spacer sequence TTCN PAM
cuuucuuaugcugauuugac

SEQ ID NO: 32570 - RNA, 20 nt, Artificial Sequence
  HTT spacer sequence TTCN PAM
uaugcugauuugacagaacc

SEQ ID NO: 32571 - RNA, 20 nt, Artificial Sequence
  HTT spacer sequence TTCN PAM
gucaaaucagcauaagaaag

SEQ ID NO: 32572 - RNA, 20 nt, Artificial Sequence
  HTT spacer sequence TTCN PAM
aaauauggguaucaagaaau

SEQ ID NO: 32573 - RNA, 20 nt, Artificial Sequence
  HTT spacer sequence TTCN PAM
ugauacccauauuuugaaga

SEQ ID NO: 32574 - RNA, 20 nt, Artificial Sequence
  HTT spacer sequence TTCN PAM
uuugcugccuugacaaagga

SEQ ID NO: 32575 - RNA, 20 nt, Artificial Sequence
  HTT spacer sequence TTCN PAM
uuacuuuaagguaauauaug

SEQ ID NO: 32576 - RNA, 20 nt, Artificial Sequence
  HTT spacer sequence TTCN PAM
uccaccuaggccucccaaag

SEQ ID NO: 32577 - RNA, 20 nt, Artificial Sequence
  HTT spacer sequence TTCN PAM
ccauguuagccaggcugguc

SEQ ID NO: 32578 - RNA, 20 nt, Artificial Sequence
  HTT spacer sequence TTCN PAM
ugccucagccucccagguag

SEQ ID NO: 32579 - RNA, 20 nt, Artificial Sequence
  HTT spacer sequence TTCN PAM
agcgauuuuccugccucagc

SEQ ID NO: 32580 - RNA, 20 nt, Artificial Sequence
  HTT spacer sequence TTCN PAM
guaauuacaaaagggcaaua

SEQ ID NO: 32581 - RNA, 20 nt, Artificial Sequence
  HTT spacer sequence TTCN PAM
uuccaccccuuuccucugag

SEQ ID NO: 32582 - RNA, 20 nt, Artificial Sequence
  HTT spacer sequence TTCN PAM
accccuuuccucugaguacc

SEQ ID NO: 32583 - RNA, 20 nt, Artificial Sequence
  HTT spacer sequence TTCN PAM
ucugaguaccuaacuuuguc

SEQ ID NO: 32584 - RNA, 20 nt, Artificial Sequence
  HTT spacer sequence TTCN PAM
uggggacaaaguuagguacu

SEQ ID NO: 32585 - RNA, 20 nt, Artificial Sequence
  HTT spacer sequence TTCN PAM
guuccucauguauccugcca

SEQ ID NO: 32586 - RNA, 20 nt, Artificial Sequence
  HTT spacer sequence TTCN PAM
ucauguauccugccagauau

SEQ ID NO: 32587 - RNA, 20 nt, Artificial Sequence
  HTT spacer sequence TTCN PAM
uauuguaagauagauuuaaa

SEQ ID NO: 32588 - RNA, 20 nt, Artificial Sequence
  HTT spacer sequence TTCN PAM
aaacuacuuuuguuuuuaga

SEQ ID NO: 32589 - RNA, 20 nt, Artificial Sequence
  HTT spacer sequence TTCN PAM
aaugcuucuccugccucagc

SEQ ID NO: 32590 - RNA, 20 nt, Artificial Sequence
  HTT spacer sequence TTCN PAM
ccugccucagccuucugagu

SEQ ID NO: 32591 - RNA, 20 nt, Artificial Sequence
  HTT spacer sequence TTCN PAM
gaguagcugggauuacaggc

SEQ ID NO: 32592 - RNA, 20 nt, Artificial Sequence
  HTT spacer sequence TTCN PAM
ccauguuggccaggcugguc

SEQ ID NO: 32593 - RNA, 20 nt, Artificial Sequence
  HTT spacer sequence TTCN PAM
agaccagccuggccaacaug

SEQ ID NO: 32594 - RNA, 20 nt, Artificial Sequence
  HTT spacer sequence TTCN PAM
agccaggcaugguggcucac

SEQ ID NO: 32595 - RNA, 20 nt, Artificial Sequence
  HTT spacer sequence TTCN PAM
uagcaugcucugaaaucaac

SEQ ID NO: 32596 - RNA, 20 nt, Artificial Sequence
  HTT spacer sequence TTCN PAM
gagcaugcuaagaaccuuua

SEQ ID NO: 32597 - RNA, 20 nt, Artificial Sequence
  HTT spacer sequence TTCN PAM
cuguauuuugcuguugagaa

SEQ ID NO: 32598 - RNA, 20 nt, Artificial Sequence
  HTT spacer sequence TTCN PAM
caacagcaaaauacagagaa

SEQ ID NO: 32599 - RNA, 20 nt, Artificial Sequence
  HTT spacer sequence TTCN PAM
cuaauuuugaguaacaaaca

SEQ ID NO: 32600 - RNA, 20 nt, Artificial Sequence
  HTT spacer sequence TTCN PAM
guucacgugcuucagccaaa

SEQ ID NO: 32601 - RNA, 20 nt, Artificial Sequence
  HTT spacer sequence TTCN PAM
cgugcuucagccaaaaaauc

SEQ ID NO: 32602 - RNA, 20 nt, Artificial Sequence
  HTT spacer sequence TTCN PAM
gccaaaaaauccucuucuca

SEQ ID NO: 32603 - RNA, 20 nt, Artificial Sequence
  HTT spacer sequence TTCN PAM
caaaguaagauugaugaaag

SEQ ID NO: 32604 - RNA, 20 nt, Artificial Sequence
  HTT spacer sequence TTCN PAM
ucaaucuuacuuugagaaga

SEQ ID NO: 32605 - RNA, 20 nt, Artificial Sequence
  HTT spacer sequence TTCN PAM
aaauugcuuucaucaaucuu

SEQ ID NO: 32606 - RNA, 20 nt, Artificial Sequence
  HTT spacer sequence TTCN PAM
guuuuuauggcucuugcucu

SEQ ID NO: 32607 - RNA, 20 nt, Artificial Sequence
  HTT spacer sequence TTCN PAM
acaccaaagagcaagagcca

SEQ ID NO: 32608 - RNA, 20 nt, Artificial Sequence
  HTT spacer sequence TTCN PAM
uuauggggcuggcugcaggc

SEQ ID NO: 32609 - RNA, 20 nt, Artificial Sequence
  HTT spacer sequence TTCN PAM
ggcaguuucuuauucuccuu

SEQ ID NO: 32610 - RNA, 20 nt, Artificial Sequence
  HTT spacer sequence TTCN PAM
uauucuccuucagauuccua

SEQ ID NO: 32611 - RNA, 20 nt, Artificial Sequence
  HTT spacer sequence TTCN PAM
ccuucagauuccuaucuggu

SEQ ID NO: 32612 - RNA, 20 nt, Artificial Sequence
  HTT spacer sequence TTCN PAM
gauuccuaucugguguuucc

SEQ ID NO: 32613 - RNA, 20 nt, Artificial Sequence
  HTT spacer sequence TTCN PAM
uaucugguguuucccugacu

SEQ ID NO: 32614 - RNA, 20 nt, Artificial Sequence
  HTT spacer sequence TTCN PAM
cugacuuuauucauucauca

SEQ ID NO: 32615 - RNA, 20 nt, Artificial Sequence
  HTT spacer sequence TTCN PAM
uucaucaguaaauauuuacu

SEQ ID NO: 32616 - RNA, 20 nt, Artificial Sequence
  HTT spacer sequence TTCN PAM
ucaguaaauauuuacuaaac

SEQ ID NO: 32617 - RNA, 20 nt, Artificial Sequence
  HTT spacer sequence TTCN PAM
cgagggcagagcuuugucug

SEQ ID NO: 32618 - RNA, 20 nt, Artificial Sequence
  HTT spacer sequence TTCN PAM
uucuaaugaaggacauagac

SEQ ID NO: 32619 - RNA, 20 nt, Artificial Sequence
  HTT spacer sequence TTCN PAM
aaugaaggacauagacagua

SEQ ID NO: 32620 - RNA, 20 nt, Artificial Sequence
  HTT spacer sequence TTCN PAM
uuagaaugaaagcuucacga

SEQ ID NO: 32621 - RNA, 20 nt, Artificial Sequence
  HTT spacer sequence TTCN PAM
uccacguauuaacguacugu

SEQ ID NO: 32622 - RNA, 20 nt, Artificial Sequence
  HTT spacer sequence TTCN PAM
aagcagggaaggggauaggg

SEQ ID NO: 32623 - RNA, 20 nt, Artificial Sequence
  HTT spacer sequence TTCN PAM
cugcuuugaaguuccuccac

SEQ ID NO: 32624 - RNA, 20 nt, Artificial Sequence
  HTT spacer sequence TTCN PAM
cuauccccuucccugcuuug

SEQ ID NO: 32625 - RNA, 20 nt, Artificial Sequence
  HTT spacer sequence TTCN PAM
agcaaaacccagaaagccug

SEQ ID NO: 32626 - RNA, 20 nt, Artificial Sequence
  HTT spacer sequence TTCN PAM
ggguuuugcuggaaagcccu

SEQ ID NO: 32627 - RNA, 20 nt, Artificial Sequence
  HTT spacer sequence TTCN PAM
aaaagagcuguagcacuaag

SEQ ID NO: 32628 - RNA, 20 nt, Artificial Sequence
  HTT spacer sequence TTCN PAM
ugcucuaucagccaggcugg

SEQ ID NO: 32629 - RNA, 20 nt, Artificial Sequence
  HTT spacer sequence TTCN PAM
agugauucucaugccucagc

SEQ ID NO: 32630 - RNA, 20 nt, Artificial Sequence
  HTT spacer sequence TTCN PAM
caugccucagccuccuguuu

SEQ ID NO: 32631 - RNA, 20 nt, Artificial Sequence
  HTT spacer sequence TTCN PAM
cccgagacggagucuugcuc

SEQ ID NO: 32632 - RNA, 20 nt, Artificial Sequence
  HTT spacer sequence TTCN PAM
cgaguucacgccauucuccu

SEQ ID NO: 32633 - RNA, 20 nt, Artificial Sequence
  HTT spacer sequence TTCN PAM
cgccauucuccugccucagu

SEQ ID NO: 32634 - RNA, 20 nt, Artificial Sequence
  HTT spacer sequence TTCN PAM
ccugccucagucucccaagu

SEQ ID NO: 32635 - RNA, 20 nt, Artificial Sequence
  HTT spacer sequence TTCN PAM
ccguguuagccaggaugauc

SEQ ID NO: 32636 - RNA, 20 nt, Artificial Sequence
  HTT spacer sequence TTCN PAM
agaccagccugcucaucaug

SEQ ID NO: 32637 - RNA, 20 nt, Artificial Sequence
  HTT spacer sequence TTCN PAM
gggaagguccacugagaaga

SEQ ID NO: 32638 - RNA, 20 nt, Artificial Sequence
  HTT spacer sequence TTCN PAM
cugaacaccguauuuaaaau

SEQ ID NO: 32639 - RNA, 20 nt, Artificial Sequence
  HTT spacer sequence TTCN PAM
caguggaccuucccugaaca

SEQ ID NO: 32640 - RNA, 20 nt, Artificial Sequence
  HTT spacer sequence TTCN PAM
agccuggguuaaagagcaag

SEQ ID NO: 32641 - RNA, 20 nt, Artificial Sequence
  HTT spacer sequence TTCN PAM
gccuugaacuccugggcuca

SEQ ID NO: 32642 - RNA, 20 nt, Artificial Sequence
  HTT spacer sequence TTCN PAM
aggcugaagugagcuacgau

SEQ ID NO: 32643 - RNA, 20 nt, Artificial Sequence
  HTT spacer sequence TTCN PAM
uacacccuuacacuagacuc

SEQ ID NO: 32644 - RNA, 20 nt, Artificial Sequence
  HTT spacer sequence TTCN PAM
agauggggggaacaggucca

SEQ ID NO: 32645 - RNA, 20 nt, Artificial Sequence
  HTT spacer sequence TTCN PAM
ccccaucuggaauaccacua

SEQ ID NO: 32646 - RNA, 20 nt, Artificial Sequence
  HTT spacer sequence TTCN PAM
uguuucaggaauagcaagga

SEQ ID NO: 32647 - RNA, 20 nt, Artificial Sequence
  HTT spacer sequence TTCN PAM
ggaauagcaaggaugucauu

SEQ ID NO: 32648 - RNA, 20 nt, Artificial Sequence
  HTT spacer sequence TTCN PAM
ugaaacaggaagauuuugga

SEQ ID NO: 32649 - RNA, 20 nt, Artificial Sequence
  HTT spacer sequence TTCN PAM
cccaacuaaaaugacauccu

SEQ ID NO: 32650 - RNA, 20 nt, Artificial Sequence
  HTT spacer sequence TTCN PAM
uacuacaaaugucccccuca

SEQ ID NO: 32651 - RNA, 20 nt, Artificial Sequence
  HTT spacer sequence TTCN PAM
aucuacaaggcaaguaguau

SEQ ID NO: 32652 - RNA, 20 nt, Artificial Sequence
  HTT spacer sequence TTCN PAM
gaucaugcuacuccucugcu

SEQ ID NO: 32653 - RNA, 20 nt, Artificial Sequence
  HTT spacer sequence TTCN PAM
aucuuaagugaacucuggcu

SEQ ID NO: 32654 - RNA, 20 nt, Artificial Sequence
  HTT spacer sequence TTCN PAM
cuuaagauugaaauucagau

SEQ ID NO: 32655 - RNA, 20 nt, Artificial Sequence
  HTT spacer sequence TTCN PAM
cucuguugucagccagaguu

SEQ ID NO: 32656 - RNA, 20 nt, Artificial Sequence
  HTT spacer sequence TTCN PAM
ccuucacucuguugucagcc

SEQ ID NO: 32657 - RNA, 20 nt, Artificial Sequence
  HTT spacer sequence TTCN PAM
gcuuuugccgguguuccccu

SEQ ID NO: 32658 - RNA, 20 nt, Artificial Sequence
  HTT spacer sequence TTCN PAM
uaacugguuucugcuuuugc

SEQ ID NO: 32659 - RNA, 20 nt, Artificial Sequence
  HTT spacer sequence TTCN PAM
gucaggguaccggcugucgg

SEQ ID NO: 32660 - RNA, 20 nt, Artificial Sequence
  HTT spacer sequence TTCN PAM
ucacacugcccacagccgac

SEQ ID NO: 32661 - RNA, 20 nt, Artificial Sequence
  HTT spacer sequence TTCN PAM
aaauccagucagucauuccu

SEQ ID NO: 32662 - RNA, 20 nt, Artificial Sequence
  HTT spacer sequence TTCN PAM
gcauucaaaauccagucagu

SEQ ID NO: 32663 - RNA, 20 nt, Artificial Sequence
  HTT spacer sequence TTCN PAM
acaagugcaguugguuccgc

SEQ ID NO: 32664 - RNA, 20 nt, Artificial Sequence
  HTT spacer sequence TTCN PAM
gcugcaaguaacagaaaauc

SEQ ID NO: 32665 - RNA, 20 nt, Artificial Sequence
  HTT spacer sequence TTCN PAM
guuacuugcagcugaauaca

SEQ ID NO: 32666 - RNA, 20 nt, Artificial Sequence
  HTT spacer sequence TTCN PAM
gauaagcucuugcuuguuac

SEQ ID NO: 32667 - RNA, 20 nt, Artificial Sequence
  HTT spacer sequence TTCN PAM
ccagacuuauuuuugucuuc

SEQ ID NO: 32668 - RNA, 20 nt, Artificial Sequence
  HTT spacer sequence TTCN PAM
acaauaaguuaaggaaccca

SEQ ID NO: 32669 - RNA, 20 nt, Artificial Sequence
  HTT spacer sequence TTCN PAM
uuaacuuauuguugaauuuc

SEQ ID NO: 32670 - RNA, 20 nt, Artificial Sequence
  HTT spacer sequence TTCN PAM
uuuuuuuuuuuuugaaacgg

SEQ ID NO: 32671 - RNA, 20 nt, Artificial Sequence
  HTT spacer sequence TTCN PAM
aaaaaaaaaaaaagaaagag

SEQ ID NO: 32672 - RNA, 20 nt, Artificial Sequence
  HTT spacer sequence TTCN PAM
cucuugucacccgggcugga

SEQ ID NO: 32673 - RNA, 20 nt, Artificial Sequence
  HTT spacer sequence TTCN PAM
agugauucuucugccucagc

SEQ ID NO: 32674 - RNA, 20 nt, Artificial Sequence
  HTT spacer sequence TTCN PAM
ucugccucagccucccaagu

SEQ ID NO: 32675 - RNA, 20 nt, Artificial Sequence
  HTT spacer sequence TTCN PAM
gccucagccucccaaguaac

SEQ ID NO: 32676 - RNA, 20 nt, Artificial Sequence
  HTT spacer sequence TTCN PAM
ccauguuggccaggcugguc

SEQ ID NO: 32677 - RNA, 20 nt, Artificial Sequence
  HTT spacer sequence TTCN PAM
agaccagccuggccaacaug

SEQ ID NO: 32678 - RNA, 20 nt, Artificial Sequence
  HTT spacer sequence TTCN PAM
gaccucaggugauccacucg

SEQ ID NO: 32679 - RNA, 20 nt, Artificial Sequence
  HTT spacer sequence TTCN PAM
gaccgggugcaguggcccaa

SEQ ID NO: 32680 - RNA, 20 nt, Artificial Sequence
  HTT spacer sequence TTCN PAM
uauacuuaccuugcaaaccc

SEQ ID NO: 32681 - RNA, 20 nt, Artificial Sequence
  HTT spacer sequence TTCN PAM
cauuuuuucccuuuguauuu

SEQ ID NO: 32682 - RNA, 20 nt, Artificial Sequence
  HTT spacer sequence TTCN PAM
cuuuguauuuuuauuguuga

SEQ ID NO: 32683 - RNA, 20 nt, Artificial Sequence
  HTT spacer sequence TTCN PAM
acaauaaaaauacaaaggga

SEQ ID NO: 32684 - RNA, 20 nt, Artificial Sequence
  HTT spacer sequence TTCN PAM
uuauauauucuggauacugg

SEQ ID NO: 32685 - RNA, 20 nt, Artificial Sequence
  HTT spacer sequence TTCN PAM
ggauacuggauucuuaucag

SEQ ID NO: 32686 - RNA, 20 nt, Artificial Sequence
  HTT spacer sequence TTCN PAM
uaucagauagaugauuugua

SEQ ID NO: 32687 - RNA, 20 nt, Artificial Sequence
  HTT spacer sequence TTCN PAM
uuuggauugucuuuuuacuu

SEQ ID NO: 32688 - RNA, 20 nt, Artificial Sequence
  HTT spacer sequence TTCN PAM
ugauagugucuuuugaagug

SEQ ID NO: 32689 - RNA, 20 nt, Artificial Sequence
  HTT spacer sequence TTCN PAM
aaagacacuaucaagaaagu

SEQ ID NO: 32690 - RNA, 20 nt, Artificial Sequence
  HTT spacer sequence TTCN PAM
ucaaaauuaaaaacuuuuac

SEQ ID NO: 32691 - RNA, 20 nt, Artificial Sequence
  HTT spacer sequence TTCN PAM
agugucauaucuaagaaauc

SEQ ID NO: 32692 - RNA, 20 nt, Artificial Sequence
  HTT spacer sequence TTCN PAM
uagauaugacacuugaagca

SEQ ID NO: 32693 - RNA, 20 nt, Artificial Sequence
  HTT spacer sequence TTCN PAM
ucuaagaauuuuagaguuuu

SEQ ID NO: 32694 - RNA, 20 nt, Artificial Sequence
  HTT spacer sequence TTCN PAM
aagaauuuuagaguuuuaca

SEQ ID NO: 32695 - RNA, 20 nt, Artificial Sequence
  HTT spacer sequence TTCN PAM
uagaagaaaacauaggagua

SEQ ID NO: 32696 - RNA, 20 nt, Artificial Sequence
  HTT spacer sequence TTCN PAM
gguagaaguccaacuuuauu

SEQ ID NO: 32697 - RNA, 20 nt, Artificial Sequence
  HTT spacer sequence TTCN PAM
accugaaccauauauaaaaa

SEQ ID NO: 32698 - RNA, 20 nt, Artificial Sequence
  HTT spacer sequence TTCN PAM
uuuccaugugguuauucagu

SEQ ID NO: 32699 - RNA, 20 nt, Artificial Sequence
  HTT spacer sequence TTCN PAM
augugguuauucaguugucc

SEQ ID NO: 32700 - RNA, 20 nt, Artificial Sequence
  HTT spacer sequence TTCN PAM
guugucccagcacuguuugu

SEQ ID NO: 32701 - RNA, 20 nt, Artificial Sequence
  HTT spacer sequence TTCN PAM
acaaacagugcugggacaac

SEQ ID NO: 32702 - RNA, 20 nt, Artificial Sequence
  HTT spacer sequence TTCN PAM
uuccccauggaauuaucuua

SEQ ID NO: 32703 - RNA, 20 nt, Artificial Sequence
  HTT spacer sequence TTCN PAM
ccauggaauuaucuuaguac

SEQ ID NO: 32704 - RNA, 20 nt, Artificial Sequence
  HTT spacer sequence TTCN PAM
auggggaaagaauagucucu

SEQ ID NO: 32705 - RNA, 20 nt, Artificial Sequence
  HTT spacer sequence TTCN PAM
acaaggguacuaagauaauu

SEQ ID NO: 32706 - RNA, 20 nt, Artificial Sequence
  HTT spacer sequence TTCN PAM
agacugucaguucuaccugu

SEQ ID NO: 32707 - RNA, 20 nt, Artificial Sequence
  HTT spacer sequence TTCN PAM
accuguuggucuuuaugucg

SEQ ID NO: 32708 - RNA, 20 nt, Artificial Sequence
  HTT spacer sequence TTCN PAM
guaaucaagacuguauggua

SEQ ID NO: 32709 - RNA, 20 nt, Artificial Sequence
  HTT spacer sequence TTCN PAM
ugaaaugugaguucuccaac

SEQ ID NO: 32710 - RNA, 20 nt, Artificial Sequence
  HTT spacer sequence TTCN PAM
ugaauuuaaacugugacaca

SEQ ID NO: 32711 - RNA, 20 nt, Artificial Sequence
  HTT spacer sequence TTCN PAM
ccaacuuuguuccuuuucaa

SEQ ID NO: 32712 - RNA, 20 nt, Artificial Sequence
  HTT spacer sequence TTCN PAM
uuuucaagauugauuuggcc

SEQ ID NO: 32713 - RNA, 20 nt, Artificial Sequence
  HTT spacer sequence TTCN PAM
agauugauuuggccaugcug

SEQ ID NO: 32714 - RNA, 20 nt, Artificial Sequence
  HTT spacer sequence TTCN PAM
guacgaauuguaggaucagc

SEQ ID NO: 32715 - RNA, 20 nt, Artificial Sequence
  HTT spacer sequence TTCN PAM
uacggaaaugcaagggaccc

SEQ ID NO: 32716 - RNA, 20 nt, Artificial Sequence
  HTT spacer sequence TTCN PAM
acaaagaagccaaguaggau

SEQ ID NO: 32717 - RNA, 20 nt, Artificial Sequence
  HTT spacer sequence TTCN PAM
uuguugaaacugacaagcug

SEQ ID NO: 32718 - RNA, 20 nt, Artificial Sequence
  HTT spacer sequence TTCN PAM
gagagggauuguguugaauc

SEQ ID NO: 32719 - RNA, 20 nt, Artificial Sequence
  HTT spacer sequence TTCN PAM
acacaaucccucucagaauc

SEQ ID NO: 32720 - RNA, 20 nt, Artificial Sequence
  HTT spacer sequence TTCN PAM
caucuuaacaauauugucuu

SEQ ID NO: 32721 - RNA, 20 nt, Artificial Sequence
  HTT spacer sequence TTCN PAM
accuaugaacaugggcaaac

SEQ ID NO: 32722 - RNA, 20 nt, Artificial Sequence
  HTT spacer sequence TTCN PAM
uagguggaagacaauauugu

SEQ ID NO: 32723 - RNA, 20 nt, Artificial Sequence
  HTT spacer sequence TTCN PAM
ggcugugugggcacaguguc

SEQ ID NO: 32724 - RNA, 20 nt, Artificial Sequence
  HTT spacer sequence TTCN PAM
ugcuacaauggcagagccgc

SEQ ID NO: 32725 - RNA, 20 nt, Artificial Sequence
  HTT spacer sequence TTCN PAM
aauagaauuuuauuaaugac

SEQ ID NO: 32726 - RNA, 20 nt, Artificial Sequence
  HTT spacer sequence TTCN PAM
auuggaacacagacacucau

SEQ ID NO: 32727 - RNA, 20 nt, Artificial Sequence
  HTT spacer sequence TTCN PAM
uugucauuaauaaaauucua

SEQ ID NO: 32728 - RNA, 20 nt, Artificial Sequence
  HTT spacer sequence TTCN PAM
aacuuccuugucauuaauaa

SEQ ID NO: 32729 - RNA, 20 nt, Artificial Sequence
  HTT spacer sequence TTCN PAM
uauaauuuucaccugucaug

SEQ ID NO: 32730 - RNA, 20 nt, Artificial Sequence
  HTT spacer sequence TTCN PAM
ccugucaugagauaguauuu

SEQ ID NO: 32731 - RNA, 20 nt, Artificial Sequence
  HTT spacer sequence TTCN PAM
uagcuugugaacuagccaaa

SEQ ID NO: 32732 - RNA, 20 nt, Artificial Sequence
  HTT spacer sequence TTCN PAM
caagcuaagaaauguuuuua

SEQ ID NO: 32733 - RNA, 20 nt, Artificial Sequence
  HTT spacer sequence TTCN PAM
cacuccuagguuaaaauaug

SEQ ID NO: 32734 - RNA, 20 nt, Artificial Sequence
  HTT spacer sequence TTCN PAM
aaaugugguccuaucauauu

SEQ ID NO: 32735 - RNA, 20 nt, Artificial Sequence
  HTT spacer sequence TTCN PAM
uuuuuuuuuuuuuuuuuuuu

SEQ ID NO: 32736 - RNA, 20 nt, Artificial Sequence
  HTT spacer sequence TTCN PAM
cucuuguugcccaggcugga

SEQ ID NO: 32737 - RNA, 20 nt, Artificial Sequence
  HTT spacer sequence TTCN PAM
agacauucuccugcacggcc

SEQ ID NO: 32738 - RNA, 20 nt, Artificial Sequence
  HTT spacer sequence TTCN PAM
ccugcacggccucccuagua

SEQ ID NO: 32739 - RNA, 20 nt, Artificial Sequence
  HTT spacer sequence TTCN PAM
ccauguuggucaggcugguc

SEQ ID NO: 32740 - RNA, 20 nt, Artificial Sequence
  HTT spacer sequence TTCN PAM
agaccagccugaccaacaug

SEQ ID NO: 32741 - RNA, 20 nt, Artificial Sequence
  HTT spacer sequence TTCN PAM
agcagggugugguggcucac

SEQ ID NO: 32742 - RNA, 20 nt, Artificial Sequence
  HTT spacer sequence TTCN PAM
uuuuuggcuguuuuuguuuu

SEQ ID NO: 32743 - RNA, 20 nt, Artificial Sequence
  HTT spacer sequence TTCN PAM
aaacuaguuuaaaaaaaaaa

SEQ ID NO: 32744 - RNA, 20 nt, Artificial Sequence
  HTT spacer sequence TTCN PAM
agcagcacagaugaaaaaca

SEQ ID NO: 32745 - RNA, 20 nt, Artificial Sequence
  HTT spacer sequence TTCN PAM
ucugugcugcuugaagauau

SEQ ID NO: 32746 - RNA, 20 nt, Artificial Sequence
  HTT spacer sequence TTCN PAM
ugcaagucugucaucuuugu

SEQ ID NO: 32747 - RNA, 20 nt, Artificial Sequence
  HTT spacer sequence TTCN PAM
uaagaacaaaaguguuucuu

SEQ ID NO: 32748 - RNA, 20 nt, Artificial Sequence
  HTT spacer sequence TTCN PAM
uaggaaguuagacaaagaug

SEQ ID NO: 32749 - RNA, 20 nt, Artificial Sequence
  HTT spacer sequence TTCN PAM
ugugucuucuucccagauuu

SEQ ID NO: 32750 - RNA, 20 nt, Artificial Sequence
  HTT spacer sequence TTCN PAM
ucccagauuuuaauaugcau

SEQ ID NO: 32751 - RNA, 20 nt, Artificial Sequence
  HTT spacer sequence TTCN PAM
cagauuuuaauaugcauaua

SEQ ID NO: 32752 - RNA, 20 nt, Artificial Sequence
  HTT spacer sequence TTCN PAM
auagcaguaccuguaauucu

SEQ ID NO: 32753 - RNA, 20 nt, Artificial Sequence
  HTT spacer sequence TTCN PAM
uauuaauugcuauguaauau

SEQ ID NO: 32754 - RNA, 20 nt, Artificial Sequence
  HTT spacer sequence TTCN PAM
aaaauauuacauagcaauua

SEQ ID NO: 32755 - RNA, 20 nt, Artificial Sequence
  HTT spacer sequence TTCN PAM
uuuuaaaagaggacuuuugg

SEQ ID NO: 32756 - RNA, 20 nt, Artificial Sequence
  HTT spacer sequence TTCN PAM
acagccacaaaaaugugaga

SEQ ID NO: 32757 - RNA, 20 nt, Artificial Sequence
  HTT spacer sequence TTCN PAM
cucuaccuugagaagucccc

SEQ ID NO: 32758 - RNA, 20 nt, Artificial Sequence
  HTT spacer sequence TTCN PAM
caagguagagagaauauguc

SEQ ID NO: 32759 - RNA, 20 nt, Artificial Sequence
  HTT spacer sequence TTCN PAM
uguaaauaagucaaccacuu

SEQ ID NO: 32760 - RNA, 20 nt, Artificial Sequence
  HTT spacer sequence TTCN PAM
aagguaguuuaucaaguggu

SEQ ID NO: 32761 - RNA, 20 nt, Artificial Sequence
  HTT spacer sequence TTCN PAM
gacaacaaggaggaaaaaua

SEQ ID NO: 32762 - RNA, 20 nt, Artificial Sequence
  HTT spacer sequence TTCN PAM
uccuuguugucugaauaaga

SEQ ID NO: 32763 - RNA, 20 nt, Artificial Sequence
  HTT spacer sequence TTCN PAM
agcccccaaauugauccaau

SEQ ID NO: 32764 - RNA, 20 nt, Artificial Sequence
  HTT spacer sequence TTCN PAM
gugagugacuuacaugcaca

SEQ ID NO: 32765 - RNA, 20 nt, Artificial Sequence
  HTT spacer sequence TTCN PAM
caaacuccaaugugcaugua

SEQ ID NO: 32766 - RNA, 20 nt, Artificial Sequence
  HTT spacer sequence TTCN PAM
ucccaaaugcuugcauuguu

SEQ ID NO: 32767 - RNA, 20 nt, Artificial Sequence
  HTT spacer sequence TTCN PAM
guagcugugaugagugagcu

SEQ ID NO: 32768 - RNA, 20 nt, Artificial Sequence
  HTT spacer sequence TTCN PAM
ucuaagcgagucccacuacc

SEQ ID NO: 32769 - RNA, 20 nt, Artificial Sequence
  HTT spacer sequence TTCN PAM
aguucaucuaagcgaguccc

SEQ ID NO: 32770 - RNA, 20 nt, Artificial Sequence
  HTT spacer sequence TTCN PAM
ucugagcagccacuauggag

SEQ ID NO: 32771 - RNA, 20 nt, Artificial Sequence
  HTT spacer sequence TTCN PAM
ccauaguggcugcucagaug

SEQ ID NO: 32772 - RNA, 20 nt, Artificial Sequence
  HTT spacer sequence TTCN PAM
guuguuuuucuccauagugg

SEQ ID NO: 32773 - RNA, 20 nt, Artificial Sequence
  HTT spacer sequence TTCN PAM
aaccacagcucuccuuugug

SEQ ID NO: 32774 - RNA, 20 nt, Artificial Sequence
  HTT spacer sequence TTCN PAM
acucaaaugucaccuucuaa

SEQ ID NO: 32775 - RNA, 20 nt, Artificial Sequence
  HTT spacer sequence TTCN PAM
cccgcuauacacauggcuug

SEQ ID NO: 32776 - RNA, 20 nt, Artificial Sequence
  HTT spacer sequence TTCN PAM
guuaacucugccuggaccuc

SEQ ID NO: 32777 - RNA, 20 nt, Artificial Sequence
  HTT spacer sequence TTCN PAM
gccuucuguuaacucugccu

SEQ ID NO: 32778 - RNA, 20 nt, Artificial Sequence
  HTT spacer sequence TTCN PAM
auguuugagaaccaguaagg

SEQ ID NO: 32779 - RNA, 20 nt, Artificial Sequence
  HTT spacer sequence TTCN PAM
caaacauggaaagcauuucu

SEQ ID NO: 32780 - RNA, 20 nt, Artificial Sequence
  HTT spacer sequence TTCN PAM
gccacuggccuccuuacugg

SEQ ID NO: 32781 - RNA, 20 nt, Artificial Sequence
  HTT spacer sequence TTCN PAM
ccuuacuucagccacuggcc

SEQ ID NO: 32782 - RNA, 20 nt, Artificial Sequence
  HTT spacer sequence TTCN PAM
gcccuucaccuuacuucagc

SEQ ID NO: 32783 - RNA, 20 nt, Artificial Sequence
  HTT spacer sequence TTCN PAM
ugccuguaauaccaguaguu

SEQ ID NO: 32784 - RNA, 20 nt, Artificial Sequence
  HTT spacer sequence TTCN PAM
ucuaaaugcauauauauaca

SEQ ID NO: 32785 - RNA, 20 nt, Artificial Sequence
  HTT spacer sequence TTCN PAM
aaauccucaccagcaugugg

SEQ ID NO: 32786 - RNA, 20 nt, Artificial Sequence
  HTT spacer sequence TTCN PAM
caccagcaauaagugaccua

SEQ ID NO: 32787 - RNA, 20 nt, Artificial Sequence
  HTT spacer sequence TTCN PAM
agaguggccguacuauauua

SEQ ID NO: 32788 - RNA, 20 nt, Artificial Sequence
  HTT spacer sequence TTCN PAM
guuuuaugacaaacugccaa

SEQ ID NO: 32789 - RNA, 20 nt, Artificial Sequence
  HTT spacer sequence TTCN PAM
cuaggauuaaugcccaggau

SEQ ID NO: 32790 - RNA, 20 nt, Artificial Sequence
  HTT spacer sequence TTCN PAM
uuucucuaggauuaaugccc

SEQ ID NO: 32791 - RNA, 20 nt, Artificial Sequence
  HTT spacer sequence TTCN PAM
cauaaaaaccuauacucaag

SEQ ID NO: 32792 - RNA, 20 nt, Artificial Sequence
  HTT spacer sequence TTCN PAM
uagauauuauggguaaagcu

SEQ ID NO: 32793 - RNA, 20 nt, Artificial Sequence
  HTT spacer sequence TTCN PAM
aguucuuagauauuaugggu

SEQ ID NO: 32794 - RNA, 20 nt, Artificial Sequence
  HTT spacer sequence TTCN PAM
acaggugaaugguuaaacua

SEQ ID NO: 32795 - RNA, 20 nt, Artificial Sequence
  HTT spacer sequence TTCN PAM
ccuguugaaggacaucugag

SEQ ID NO: 32796 - RNA, 20 nt, Artificial Sequence
  HTT spacer sequence TTCN PAM
uuuuuauuacugaguaguuu

SEQ ID NO: 32797 - RNA, 20 nt, Artificial Sequence
  HTT spacer sequence TTCN PAM
ccuaaacuguugcaugcuau

SEQ ID NO: 32798 - RNA, 20 nt, Artificial Sequence
  HTT spacer sequence TTCN PAM
uuagcauaacuucaccuaaa

SEQ ID NO: 32799 - RNA, 20 nt, Artificial Sequence
  HTT spacer sequence TTCN PAM
auguuuuuuugcaauggcac

SEQ ID NO: 32800 - RNA, 20 nt, Artificial Sequence
  HTT spacer sequence TTCN PAM
ccaucccuaaaacugugcca

SEQ ID NO: 32801 - RNA, 20 nt, Artificial Sequence
  HTT spacer sequence TTCN PAM
cuccucugccaccacuaacc

SEQ ID NO: 32802 - RNA, 20 nt, Artificial Sequence
  HTT spacer sequence TTCN PAM
ccucccucucuuuucucucc

SEQ ID NO: 32803 - RNA, 20 nt, Artificial Sequence
  HTT spacer sequence TTCN PAM
ccuguguuguccuuuuauaa

SEQ ID NO: 32804 - RNA, 20 nt, Artificial Sequence
  HTT spacer sequence TTCN PAM
auuacaaguauuccccugug

SEQ ID NO: 32805 - RNA, 20 nt, Artificial Sequence
  HTT spacer sequence TTCN PAM
cacugcaaccucugccuccu

SEQ ID NO: 32806 - RNA, 20 nt, Artificial Sequence
  HTT spacer sequence TTCN PAM
agugauacuugugucucagu

SEQ ID NO: 32807 - RNA, 20 nt, Artificial Sequence
  HTT spacer sequence TTCN PAM
gagugaaacaaaccagaggu

SEQ ID NO: 32808 - RNA, 20 nt, Artificial Sequence
  HTT spacer sequence TTCN PAM
cucugaacaugggagacuga

SEQ ID NO: 32809 - RNA, 20 nt, Artificial Sequence
  HTT spacer sequence TTCN PAM
uccaaauaauccaacacaca

SEQ ID NO: 32810 - RNA, 20 nt, Artificial Sequence
  HTT spacer sequence TTCN PAM
agaccagccgggccaacaug

SEQ ID NO: 32811 - RNA, 20 nt, Artificial Sequence
  HTT spacer sequence TTCN PAM
ucauguuggcccggcugguc

SEQ ID NO: 32812 - RNA, 20 nt, Artificial Sequence
  HTT spacer sequence TTCN PAM
cuugccucagccucccaagu

SEQ ID NO: 32813 - RNA, 20 nt, Artificial Sequence
  HTT spacer sequence TTCN PAM
agcaguucucuugccucagc

SEQ ID NO: 32814 - RNA, 20 nt, Artificial Sequence
  HTT spacer sequence TTCN PAM
gccugugugacagaguaaga

SEQ ID NO: 32815 - RNA, 20 nt, Artificial Sequence
  HTT spacer sequence TTCN PAM
ccguguuagccgggaugguc

SEQ ID NO: 32816 - RNA, 20 nt, Artificial Sequence
  HTT spacer sequence TTCN PAM
gccucccaaguagcugggac

SEQ ID NO: 32817 - RNA, 20 nt, Artificial Sequence
  HTT spacer sequence TTCN PAM
ccugcuucagccucccaagu

SEQ ID NO: 32818 - RNA, 20 nt, Artificial Sequence
  HTT spacer sequence TTCN PAM
caccauucuccugcuucagc

SEQ ID NO: 32819 - RNA, 20 nt, Artificial Sequence
  HTT spacer sequence TTCN PAM
cccgagacggagucuugcuc

SEQ ID NO: 32820 - RNA, 20 nt, Artificial Sequence
  HTT spacer sequence TTCN PAM
auuuauuuauuuuuuuuuuu

SEQ ID NO: 32821 - RNA, 20 nt, Artificial Sequence
  HTT spacer sequence TTCN PAM
ccaggcuagagugcaauggc

SEQ ID NO: 32822 - RNA, 20 nt, Artificial Sequence
  HTT spacer sequence TTCN PAM
agcaguucuucugccgcagc

SEQ ID NO: 32823 - RNA, 20 nt, Artificial Sequence
  HTT spacer sequence TTCN PAM
ucugccgcagccucccgagu

SEQ ID NO: 32824 - RNA, 20 nt, Artificial Sequence
  HTT spacer sequence TTCN PAM
gccgcagccucccgaguagc

SEQ ID NO: 32825 - RNA, 20 nt, Artificial Sequence
  HTT spacer sequence TTCN PAM
ccaugcuggccaggcugguc

SEQ ID NO: 32826 - RNA, 20 nt, Artificial Sequence
  HTT spacer sequence TTCN PAM
agaccagccuggccagcaug

SEQ ID NO: 32827 - RNA, 20 nt, Artificial Sequence
  HTT spacer sequence TTCN PAM
aaauuaaaacaaacggccag

SEQ ID NO: 32828 - RNA, 20 nt, Artificial Sequence
  HTT spacer sequence TTCN PAM
ccuucaaaauuaaaacaaac

SEQ ID NO: 32829 - RNA, 20 nt, Artificial Sequence
  HTT spacer sequence TTCN PAM
cuucaccuucaaaauuaaaa

SEQ ID NO: 32830 - RNA, 20 nt, Artificial Sequence
  HTT spacer sequence TTCN PAM
aucacuuuugguaaauguag

SEQ ID NO: 32831 - RNA, 20 nt, Artificial Sequence
  HTT spacer sequence TTCN PAM
uacccuguuuuuccaguucu

SEQ ID NO: 32832 - RNA, 20 nt, Artificial Sequence
  HTT spacer sequence TTCN PAM
aguucuugcucagagcaagg

SEQ ID NO: 32833 - RNA, 20 nt, Artificial Sequence
  HTT spacer sequence TTCN PAM
ugcucagagcaaggugguuu

SEQ ID NO: 32834 - RNA, 20 nt, Artificial Sequence
  HTT spacer sequence TTCN PAM
uuuucacuuaaucaccauac

SEQ ID NO: 32835 - RNA, 20 nt, Artificial Sequence
  HTT spacer sequence TTCN PAM
cuuaaucaccauacuuacuu

SEQ ID NO: 32836 - RNA, 20 nt, Artificial Sequence
  HTT spacer sequence TTCN PAM
uguagaacaagucaguuuga

SEQ ID NO: 32837 - RNA, 20 nt, Artificial Sequence
  HTT spacer sequence TTCN PAM
acaugaaaaguaaguauggu

SEQ ID NO: 32838 - RNA, 20 nt, Artificial Sequence
  HTT spacer sequence TTCN PAM
ucaucuuaacuaaauuccau

SEQ ID NO: 32839 - RNA, 20 nt, Artificial Sequence
  HTT spacer sequence TTCN PAM
augggggaaggaauuaguuu

SEQ ID NO: 32840 - RNA, 20 nt, Artificial Sequence
  HTT spacer sequence TTCN PAM
cccauggaauuuaguuaaga

SEQ ID NO: 32841 - RNA, 20 nt, Artificial Sequence
  HTT spacer sequence TTCN PAM
uucccccauggaauuuaguu

SEQ ID NO: 32842 - RNA, 20 nt, Artificial Sequence
  HTT spacer sequence TTCN PAM
uaaacuuccagguuugcuua

SEQ ID NO: 32843 - RNA, 20 nt, Artificial Sequence
  HTT spacer sequence TTCN PAM
agguuugcuuauuggacaaa

SEQ ID NO: 32844 - RNA, 20 nt, Artificial Sequence
  HTT spacer sequence TTCN PAM
uugguaauacaauuuucuca

SEQ ID NO: 32845 - RNA, 20 nt, Artificial Sequence
  HTT spacer sequence TTCN PAM
cagaaacuuaguagucuuuu

SEQ ID NO: 32846 - RNA, 20 nt, Artificial Sequence
  HTT spacer sequence TTCN PAM
gagaaaauuguauuaccaaa

SEQ ID NO: 32847 - RNA, 20 nt, Artificial Sequence
  HTT spacer sequence TTCN PAM
caguuggcacuaucaaaaua

SEQ ID NO: 32848 - RNA, 20 nt, Artificial Sequence
  HTT spacer sequence TTCN PAM
gaugucuucacaguuggcac

SEQ ID NO: 32849 - RNA, 20 nt, Artificial Sequence
  HTT spacer sequence TTCN PAM
cauccaaaccuauggcuuca

SEQ ID NO: 32850 - RNA, 20 nt, Artificial Sequence
  HTT spacer sequence TTCN PAM
ccaggcuguuuaucuccuuu

SEQ ID NO: 32851 - RNA, 20 nt, Artificial Sequence
  HTT spacer sequence TTCN PAM
cagccaagcaaaaggagaua

SEQ ID NO: 32852 - RNA, 20 nt, Artificial Sequence
  HTT spacer sequence TTCN PAM
cagcuauuuggggacauaga

SEQ ID NO: 32853 - RNA, 20 nt, Artificial Sequence
  HTT spacer sequence TTCN PAM
auguccccaaauagcuggga

SEQ ID NO: 32854 - RNA, 20 nt, Artificial Sequence
  HTT spacer sequence TTCN PAM
caaaaucguuaacugacuac

SEQ ID NO: 32855 - RNA, 20 nt, Artificial Sequence
  HTT spacer sequence TTCN PAM
guucucaaaaucguuaacug

SEQ ID NO: 32856 - RNA, 20 nt, Artificial Sequence
  HTT spacer sequence TTCN PAM
ucuaauugaauuucccaucu

SEQ ID NO: 32857 - RNA, 20 nt, Artificial Sequence
  HTT spacer sequence TTCN PAM
aauugaauuucccaucucuu

SEQ ID NO: 32858 - RNA, 20 nt, Artificial Sequence
  HTT spacer sequence TTCN PAM
auuagaagaaacacagucua

SEQ ID NO: 32859 - RNA, 20 nt, Artificial Sequence
  HTT spacer sequence TTCN PAM
caucucuuguaaucuaugcc

SEQ ID NO: 32860 - RNA, 20 nt, Artificial Sequence
  HTT spacer sequence TTCN PAM
guacugcugagaaagaaaga

SEQ ID NO: 32861 - RNA, 20 nt, Artificial Sequence
  HTT spacer sequence TTCN PAM
cagcaguacagaagaugaug

SEQ ID NO: 32862 - RNA, 20 nt, Artificial Sequence
  HTT spacer sequence TTCN PAM
uucucagcaguacagaagau

SEQ ID NO: 32863 - RNA, 20 nt, Artificial Sequence
  HTT spacer sequence TTCN PAM
uucuuucucagcaguacaga

SEQ ID NO: 32864 - RNA, 20 nt, Artificial Sequence
  HTT spacer sequence TTCN PAM
aaucaaacuauaccacuggu

SEQ ID NO: 32865 - RNA, 20 nt, Artificial Sequence
  HTT spacer sequence TTCN PAM
aacgugaaauugauugagua

SEQ ID NO: 32866 - RNA, 20 nt, Artificial Sequence
  HTT spacer sequence TTCN PAM
cguuugaaucauguguuaac

SEQ ID NO: 32867 - RNA, 20 nt, Artificial Sequence
  HTT spacer sequence TTCN PAM
ccaauacucaaucaauuuca

SEQ ID NO: 32868 - RNA, 20 nt, Artificial Sequence
  HTT spacer sequence TTCN PAM
ggcuuuaaaucuccucugua

SEQ ID NO: 32869 - RNA, 20 nt, Artificial Sequence
  HTT spacer sequence TTCN PAM
uaucugugugaucuugggca

SEQ ID NO: 32870 - RNA, 20 nt, Artificial Sequence
  HTT spacer sequence TTCN PAM
auuucuucucucuauaaugg

SEQ ID NO: 32871 - RNA, 20 nt, Artificial Sequence
  HTT spacer sequence TTCN PAM
ucucucuauaaugggggaag

SEQ ID NO: 32872 - RNA, 20 nt, Artificial Sequence
  HTT spacer sequence TTCN PAM
cucuauaaugggggaaguga

SEQ ID NO: 32873 - RNA, 20 nt, Artificial Sequence
  HTT spacer sequence TTCN PAM
cccauuauagagagaagaaa

SEQ ID NO: 32874 - RNA, 20 nt, Artificial Sequence
  HTT spacer sequence TTCN PAM
caucuuggccucccaaagca

SEQ ID NO: 32875 - RNA, 20 nt, Artificial Sequence
  HTT spacer sequence TTCN PAM
aaauauuuuguagagacggg

SEQ ID NO: 32876 - RNA, 20 nt, Artificial Sequence
  HTT spacer sequence TTCN PAM
gccuaggaguuuaaggcuaa

SEQ ID NO: 32877 - RNA, 20 nt, Artificial Sequence
  HTT spacer sequence TTCN PAM
cccauuuuacuuuauuuuac

SEQ ID NO: 32878 - RNA, 20 nt, Artificial Sequence
  HTT spacer sequence TTCN PAM
uuucccccauuuuacuuuau

SEQ ID NO: 32879 - RNA, 20 nt, Artificial Sequence
  HTT spacer sequence TTCN PAM
gugagcagcguagcuugaca

SEQ ID NO: 32880 - RNA, 20 nt, Artificial Sequence
  HTT spacer sequence TTCN PAM
ccaauggcugucaagcuacg

SEQ ID NO: 32881 - RNA, 20 nt, Artificial Sequence
  HTT spacer sequence TTCN PAM
cuguccagauccccauucug

SEQ ID NO: 32882 - RNA, 20 nt, Artificial Sequence
  HTT spacer sequence TTCN PAM
gcccgcaacauggaguauaa

SEQ ID NO: 32883 - RNA, 20 nt, Artificial Sequence
  HTT spacer sequence TTCN PAM
uaguagucgagaaacacuca

SEQ ID NO: 32884 - RNA, 20 nt, Artificial Sequence
  HTT spacer sequence TTCN PAM
cgacuacuaugaauaaaccg

SEQ ID NO: 32885 - RNA, 20 nt, Artificial Sequence
  HTT spacer sequence TTCN PAM
gugaguguuucucgacuacu

SEQ ID NO: 32886 - RNA, 20 nt, Artificial Sequence
  HTT spacer sequence TTCN PAM
uucagugaguguuucucgac

SEQ ID NO: 32887 - RNA, 20 nt, Artificial Sequence
  HTT spacer sequence TTCN PAM
uucauucagugaguguuucu

SEQ ID NO: 32888 - RNA, 20 nt, Artificial Sequence
  HTT spacer sequence TTCN PAM
acaccucauucauucauuca

SEQ ID NO: 32889 - RNA, 20 nt, Artificial Sequence
  HTT spacer sequence TTCN PAM
acacauauuaauuuccuucu

SEQ ID NO: 32890 - RNA, 20 nt, Artificial Sequence
  HTT spacer sequence TTCN PAM
uucuuuuuuuuauuuuuaga

SEQ ID NO: 32891 - RNA, 20 nt, Artificial Sequence
  HTT spacer sequence TTCN PAM
uuuuuuuauuuuuagaaaga

SEQ ID NO: 32892 - RNA, 20 nt, Artificial Sequence
  HTT spacer sequence TTCN PAM
aaaaauaaaaaaaagaagga

SEQ ID NO: 32893 - RNA, 20 nt, Artificial Sequence
  HTT spacer sequence TTCN PAM
uucuaaaaauaaaaaaaaga

SEQ ID NO: 32894 - RNA, 20 nt, Artificial Sequence
  HTT spacer sequence TTCN PAM
uucuuucuaaaaauaaaaaa

SEQ ID NO: 32895 - RNA, 20 nt, Artificial Sequence
  HTT spacer sequence TTCN PAM
gcuaccaagaaagaccgugu

SEQ ID NO: 32896 - RNA, 20 nt, Artificial Sequence
  HTT spacer sequence TTCN PAM
ugguagcugaaaguucuuuc

SEQ ID NO: 32897 - RNA, 20 nt, Artificial Sequence
  HTT spacer sequence TTCN PAM
cacggucuuucuugguagcu

SEQ ID NO: 32898 - RNA, 20 nt, Artificial Sequence
  HTT spacer sequence TTCN PAM
cauauugucagacaaugauu

SEQ ID NO: 32899 - RNA, 20 nt, Artificial Sequence
  HTT spacer sequence TTCN PAM
aagugcaauuaccugacaga

SEQ ID NO: 32900 - RNA, 20 nt, Artificial Sequence
  HTT spacer sequence TTCN PAM
cuagacaguucaaagugcaa

SEQ ID NO: 32901 - RNA, 20 nt, Artificial Sequence
  HTT spacer sequence TTCN PAM
uauuuucucuagacaguuca

SEQ ID NO: 32902 - RNA, 20 nt, Artificial Sequence
  HTT spacer sequence TTCN PAM
gucuuaaugggcuagaauau

SEQ ID NO: 32903 - RNA, 20 nt, Artificial Sequence
  HTT spacer sequence TTCN PAM
agcccauuaagacugaaaau

SEQ ID NO: 32904 - RNA, 20 nt, Artificial Sequence
  HTT spacer sequence TTCN PAM
uugugucccagcuauuuuaa

SEQ ID NO: 32905 - RNA, 20 nt, Artificial Sequence
  HTT spacer sequence TTCN PAM
gaaauccauuuaagaugaag

SEQ ID NO: 32906 - RNA, 20 nt, Artificial Sequence
  HTT spacer sequence TTCN PAM
gaauccauuuaaaauagcug

SEQ ID NO: 32907 - RNA, 20 nt, Artificial Sequence
  HTT spacer sequence TTCN PAM
ucuuaaauggauuucugaau

SEQ ID NO: 32908 - RNA, 20 nt, Artificial Sequence
  HTT spacer sequence TTCN PAM
ucaucuuaaauggauuucug

SEQ ID NO: 32909 - RNA, 20 nt, Artificial Sequence
  HTT spacer sequence TTCN PAM
cauauuucuggcuauauaca

SEQ ID NO: 32910 - RNA, 20 nt, Artificial Sequence
  HTT spacer sequence TTCN PAM
ggcuauauacaaggauaucc

SEQ ID NO: 32911 - RNA, 20 nt, Artificial Sequence
  HTT spacer sequence TTCN PAM
gugucuggauauccuuguau

SEQ ID NO: 32912 - RNA, 20 nt, Artificial Sequence
  HTT spacer sequence TTCN PAM
uuucagugucuggauauccu

SEQ ID NO: 32913 - RNA, 20 nt, Artificial Sequence
  HTT spacer sequence TTCN PAM
cuuuuuguaaucuuuuaugc

SEQ ID NO: 32914 - RNA, 20 nt, Artificial Sequence
  HTT spacer sequence TTCN PAM
auuaccauaaugguuuuaau

SEQ ID NO: 32915 - RNA, 20 nt, Artificial Sequence
  HTT spacer sequence TTCN PAM
uacuauugcaacaaaugcaa

SEQ ID NO: 32916 - RNA, 20 nt, Artificial Sequence
  HTT spacer sequence TTCN PAM
guuugucucucuuauuugcu

SEQ ID NO: 32917 - RNA, 20 nt, Artificial Sequence
  HTT spacer sequence TTCN PAM
uggcaguuugcuguccuauu

SEQ ID NO: 32918 - RNA, 20 nt, Artificial Sequence
  HTT spacer sequence TTCN PAM
ggauuaguggggaucguggg

SEQ ID NO: 32919 - RNA, 20 nt, Artificial Sequence
  HTT spacer sequence TTCN PAM
uugcuugaucuuucucacug

SEQ ID NO: 32920 - RNA, 20 nt, Artificial Sequence
  HTT spacer sequence TTCN PAM
cacugggaugaacuagcagc

SEQ ID NO: 32921 - RNA, 20 nt, Artificial Sequence
  HTT spacer sequence TTCN PAM
ucccagugagaaagaucaag

SEQ ID NO: 32922 - RNA, 20 nt, Artificial Sequence
  HTT spacer sequence TTCN PAM
uuuguagcugcuuugcuuuu

SEQ ID NO: 32923 - RNA, 20 nt, Artificial Sequence
  HTT spacer sequence TTCN PAM
gaccguuguuccuaguagcu

SEQ ID NO: 32924 - RNA, 20 nt, Artificial Sequence
  HTT spacer sequence TTCN PAM
uaguagcuguagaugguaaa

SEQ ID NO: 32925 - RNA, 20 nt, Artificial Sequence
  HTT spacer sequence TTCN PAM
aauggcucaguaggagacau

SEQ ID NO: 32926 - RNA, 20 nt, Artificial Sequence
  HTT spacer sequence TTCN PAM
ccuaugauaucugaauucug

SEQ ID NO: 32927 - RNA, 20 nt, Artificial Sequence
  HTT spacer sequence TTCN PAM
gauaucauaggugaauaugu

SEQ ID NO: 32928 - RNA, 20 nt, Artificial Sequence
  HTT spacer sequence TTCN PAM
guuacccacaugggcaugcg

SEQ ID NO: 32929 - RNA, 20 nt, Artificial Sequence
  HTT spacer sequence TTCN PAM
cgcaugcccauguggguaac

SEQ ID NO: 32930 - RNA, 20 nt, Artificial Sequence
  HTT spacer sequence TTCN PAM
cuuggaauaaauaauucaug

SEQ ID NO: 32931 - RNA, 20 nt, Artificial Sequence
  HTT spacer sequence TTCN PAM
aagggaaaguaaggcaaggc

SEQ ID NO: 32932 - RNA, 20 nt, Artificial Sequence
  HTT spacer sequence TTCN PAM
uguuauucuccugguagaag

SEQ ID NO: 32933 - RNA, 20 nt, Artificial Sequence
  HTT spacer sequence TTCN PAM
ccugguagaagcuagaaaaa

SEQ ID NO: 32934 - RNA, 20 nt, Artificial Sequence
  HTT spacer sequence TTCN PAM
accaggagaauaacaugaau

SEQ ID NO: 32935 - RNA, 20 nt, Artificial Sequence
  HTT spacer sequence TTCN PAM
agcuucuaccaggagaauaa

SEQ ID NO: 32936 - RNA, 20 nt, Artificial Sequence
  HTT spacer sequence TTCN PAM
gacugacuauaaaggcuuuu

SEQ ID NO: 32937 - RNA, 20 nt, Artificial Sequence
  HTT spacer sequence TTCN PAM
uuuuuuaauuuuuuuuugag

SEQ ID NO: 32938 - RNA, 20 nt, Artificial Sequence
  HTT spacer sequence TTCN PAM
cucuuguugcccaggcugga

SEQ ID NO: 32939 - RNA, 20 nt, Artificial Sequence
  HTT spacer sequence TTCN PAM
agugauucuccugccucagc

SEQ ID NO: 32940 - RNA, 20 nt, Artificial Sequence
  HTT spacer sequence TTCN PAM
ccugccucagccucccaagu

SEQ ID NO: 32941 - RNA, 20 nt, Artificial Sequence
  HTT spacer sequence TTCN PAM
agaucagccugaccaacauc

SEQ ID NO: 32942 - RNA, 20 nt, Artificial Sequence
  HTT spacer sequence TTCN PAM
uuuguuuuuucaaaaaauuu

SEQ ID NO: 32943 - RNA, 20 nt, Artificial Sequence
  HTT spacer sequence TTCN PAM
aaaaauuuccucuuggccau

SEQ ID NO: 32944 - RNA, 20 nt, Artificial Sequence
  HTT spacer sequence TTCN PAM
ucuuggccauugcuuuucac

SEQ ID NO: 32945 - RNA, 20 nt, Artificial Sequence
  HTT spacer sequence TTCN PAM
cuuuuguuuuuuuuuuuuuu

SEQ ID NO: 32946 - RNA, 20 nt, Artificial Sequence
  HTT spacer sequence TTCN PAM
cgccauucuccugcuucagc

SEQ ID NO: 32947 - RNA, 20 nt, Artificial Sequence
  HTT spacer sequence TTCN PAM
ccugcuucagccuggcgagu

SEQ ID NO: 32948 - RNA, 20 nt, Artificial Sequence
  HTT spacer sequence TTCN PAM
gccuggcgaguagcugggac

SEQ ID NO: 32949 - RNA, 20 nt, Artificial Sequence
  HTT spacer sequence TTCN PAM
ccguggucuugaucuccuga

SEQ ID NO: 32950 - RNA, 20 nt, Artificial Sequence
  HTT spacer sequence TTCN PAM
guauauauauucguaauguu

SEQ ID NO: 32951 - RNA, 20 nt, Artificial Sequence
  HTT spacer sequence TTCN PAM
uaauguuguacagccaucac

SEQ ID NO: 32952 - RNA, 20 nt, Artificial Sequence
  HTT spacer sequence TTCN PAM
uaaguuuuucuucugucaaa

SEQ ID NO: 32953 - RNA, 20 nt, Artificial Sequence
  HTT spacer sequence TTCN PAM
ucugucaaaacugaacaucu

SEQ ID NO: 32954 - RNA, 20 nt, Artificial Sequence
  HTT spacer sequence TTCN PAM
gucaaaacugaacaucuguc

SEQ ID NO: 32955 - RNA, 20 nt, Artificial Sequence
  HTT spacer sequence TTCN PAM
guuuugacagaagaaaaacu

SEQ ID NO: 32956 - RNA, 20 nt, Artificial Sequence
  HTT spacer sequence TTCN PAM
uuaaacucccuaucauccau

SEQ ID NO: 32957 - RNA, 20 nt, Artificial Sequence
  HTT spacer sequence TTCN PAM
uuccuguagucccuuucuac

SEQ ID NO: 32958 - RNA, 20 nt, Artificial Sequence
  HTT spacer sequence TTCN PAM
uguagucccuuucuacuuuc

SEQ ID NO: 32959 - RNA, 20 nt, Artificial Sequence
  HTT spacer sequence TTCN PAM
acuuucugucuguaugagug

SEQ ID NO: 32960 - RNA, 20 nt, Artificial Sequence
  HTT spacer sequence TTCN PAM
gucuguaugaguguaacugc

SEQ ID NO: 32961 - RNA, 20 nt, Artificial Sequence
  HTT spacer sequence TTCN PAM
uacaggauuuguguuuuuuu

SEQ ID NO: 32962 - RNA, 20 nt, Artificial Sequence
  HTT spacer sequence TTCN PAM
aagugauuucacaaaaccgu

SEQ ID NO: 32963 - RNA, 20 nt, Artificial Sequence
  HTT spacer sequence TTCN PAM
caaaaccguuucauuuuagg

SEQ ID NO: 32964 - RNA, 20 nt, Artificial Sequence
  HTT spacer sequence TTCN PAM
uuuuagguuaacucauuucu

SEQ ID NO: 32965 - RNA, 20 nt, Artificial Sequence
  HTT spacer sequence TTCN PAM
guuguuugugaaauacugug

SEQ ID NO: 32966 - RNA, 20 nt, Artificial Sequence
  HTT spacer sequence TTCN PAM
caaacaacagaaaugaguua

SEQ ID NO: 32967 - RNA, 20 nt, Artificial Sequence
  HTT spacer sequence TTCN PAM
guucuguuucugucuaauuu

SEQ ID NO: 32968 - RNA, 20 nt, Artificial Sequence
  HTT spacer sequence TTCN PAM
guuucugucuaauuugugga

SEQ ID NO: 32969 - RNA, 20 nt, Artificial Sequence
  HTT spacer sequence TTCN PAM
gucuaauuuguggaaauguu

SEQ ID NO: 32970 - RNA, 20 nt, Artificial Sequence
  HTT spacer sequence TTCN PAM
acaaauuagacagaaacaga

SEQ ID NO: 32971 - RNA, 20 nt, Artificial Sequence
  HTT spacer sequence TTCN PAM
cacaacauuuccacaaauua

SEQ ID NO: 32972 - RNA, 20 nt, Artificial Sequence
  HTT spacer sequence TTCN PAM
ucccacaacauuuccacaaa

SEQ ID NO: 32973 - RNA, 20 nt, Artificial Sequence
  HTT spacer sequence TTCN PAM
uuuucuucccacaacauuuc

SEQ ID NO: 32974 - RNA, 20 nt, Artificial Sequence
  HTT spacer sequence TTCN PAM
ggacauaugcucauuuguua

SEQ ID NO: 32975 - RNA, 20 nt, Artificial Sequence
  HTT spacer sequence TTCN PAM
aaguuagcaugcuauuguag

SEQ ID NO: 32976 - RNA, 20 nt, Artificial Sequence
  HTT spacer sequence TTCN PAM
acaauagcaugcuaacuuag

SEQ ID NO: 32977 - RNA, 20 nt, Artificial Sequence
  HTT spacer sequence TTCN PAM
uacuuuuaucauagcguugu

SEQ ID NO: 32978 - RNA, 20 nt, Artificial Sequence
  HTT spacer sequence TTCN PAM
aaccuuuuuuuuuccuacuu

SEQ ID NO: 32979 - RNA, 20 nt, Artificial Sequence
  HTT spacer sequence TTCN PAM
aucucugcuaccuguguaag

SEQ ID NO: 32980 - RNA, 20 nt, Artificial Sequence
  HTT spacer sequence TTCN PAM
aaaaugagccaguaaggcuc

SEQ ID NO: 32981 - RNA, 20 nt, Artificial Sequence
  HTT spacer sequence TTCN PAM
ugugggaucagaugguacau

SEQ ID NO: 32982 - RNA, 20 nt, Artificial Sequence
  HTT spacer sequence TTCN PAM
cauguaccaucugaucccac

SEQ ID NO: 32983 - RNA, 20 nt, Artificial Sequence
  HTT spacer sequence TTCN PAM
caguguuucacauguaccau

SEQ ID NO: 32984 - RNA, 20 nt, Artificial Sequence
  HTT spacer sequence TTCN PAM
uuagccaccugagcgggaag

SEQ ID NO: 32985 - RNA, 20 nt, Artificial Sequence
  HTT spacer sequence TTCN PAM
cgcucagguggcuaaugaac

SEQ ID NO: 32986 - RNA, 20 nt, Artificial Sequence
  HTT spacer sequence TTCN PAM
cgcuauucuccugccccagc

SEQ ID NO: 32987 - RNA, 20 nt, Artificial Sequence
  HTT spacer sequence TTCN PAM
ccugccccagccucccaagu

SEQ ID NO: 32988 - RNA, 20 nt, Artificial Sequence
  HTT spacer sequence TTCN PAM
ccguguuagccaggaugguc

SEQ ID NO: 32989 - RNA, 20 nt, Artificial Sequence
  HTT spacer sequence TTCN PAM
caaaaaaaguaaagauggcc

SEQ ID NO: 32990 - RNA, 20 nt, Artificial Sequence
  HTT spacer sequence TTCN PAM
ucugaucuccaccauccagg

SEQ ID NO: 32991 - RNA, 20 nt, Artificial Sequence
  HTT spacer sequence TTCN PAM
cugagaccuggaugguggag

SEQ ID NO: 32992 - RNA, 20 nt, Artificial Sequence
  HTT spacer sequence TTCN PAM
cucugaaagcuuauugaccc

SEQ ID NO: 32993 - RNA, 20 nt, Artificial Sequence
  HTT spacer sequence TTCN PAM
gagagaaauuauguucucug

SEQ ID NO: 32994 - RNA, 20 nt, Artificial Sequence
  HTT spacer sequence TTCN PAM
ugggucaauaagcuuucaga

SEQ ID NO: 32995 - RNA, 20 nt, Artificial Sequence
  HTT spacer sequence TTCN PAM
aucugagugcgucaggcuuu

SEQ ID NO: 32996 - RNA, 20 nt, Artificial Sequence
  HTT spacer sequence TTCN PAM
ugucauuuugucuuuugaua

SEQ ID NO: 32997 - RNA, 20 nt, Artificial Sequence
  HTT spacer sequence TTCN PAM
aauggaauucauggaauguu

SEQ ID NO: 32998 - RNA, 20 nt, Artificial Sequence
  HTT spacer sequence TTCN PAM
auuugaaaauuaucaaaaga

SEQ ID NO: 32999 - RNA, 20 nt, Artificial Sequence
  HTT spacer sequence TTCN PAM
uggaauguuggcuuauauuc

SEQ ID NO: 33000 - RNA, 20 nt, Artificial Sequence
  HTT spacer sequence TTCN PAM
augaauuccauuugaaaauu

SEQ ID NO: 33001 - RNA, 20 nt, Artificial Sequence
  HTT spacer sequence TTCN PAM
uauauuaguaaaguauguug

SEQ ID NO: 33002 - RNA, 20 nt, Artificial Sequence
  HTT spacer sequence TTCN PAM
auaugccauauuaaaucaaa

SEQ ID NO: 33003 - RNA, 20 nt, Artificial Sequence
  HTT spacer sequence TTCN PAM
cauuagucugucucuuguuu

SEQ ID NO: 33004 - RNA, 20 nt, Artificial Sequence
  HTT spacer sequence TTCN PAM
uuaugcuuguucuacagaag

SEQ ID NO: 33005 - RNA, 20 nt, Artificial Sequence
  HTT spacer sequence TTCN PAM
acagaagagcauguuaaaag

SEQ ID NO: 33006 - RNA, 20 nt, Artificial Sequence
  HTT spacer sequence TTCN PAM
guagaacaagcauaaugaac

SEQ ID NO: 33007 - RNA, 20 nt, Artificial Sequence
  HTT spacer sequence TTCN PAM
ugguuucauaggauacacuc

SEQ ID NO: 33008 - RNA, 20 nt, Artificial Sequence
  HTT spacer sequence TTCN PAM
uaggauacacucuauacuuu

SEQ ID NO: 33009 - RNA, 20 nt, Artificial Sequence
  HTT spacer sequence TTCN PAM
gaguauauagcugaagguga

SEQ ID NO: 33010 - RNA, 20 nt, Artificial Sequence
  HTT spacer sequence TTCN PAM
gcuauauacucugaaauccc

SEQ ID NO: 33011 - RNA, 20 nt, Artificial Sequence
  HTT spacer sequence TTCN PAM
auaaaacauauuuacauaaa

SEQ ID NO: 33012 - RNA, 20 nt, Artificial Sequence
  HTT spacer sequence TTCN PAM
uguuaacucuccuaaaauau

SEQ ID NO: 33013 - RNA, 20 nt, Artificial Sequence
  HTT spacer sequence TTCN PAM
aaaaguuuaauuauauuuua

SEQ ID NO: 33014 - RNA, 20 nt, Artificial Sequence
  HTT spacer sequence TTCN PAM
gacguuuucaauguaggaag

SEQ ID NO: 33015 - RNA, 20 nt, Artificial Sequence
  HTT spacer sequence TTCN PAM
auguaggaagucauuuaaaa

SEQ ID NO: 33016 - RNA, 20 nt, Artificial Sequence
  HTT spacer sequence TTCN PAM
uacauugaaaacgucagaag

SEQ ID NO: 33017 - RNA, 20 nt, Artificial Sequence
  HTT spacer sequence TTCN PAM
uguauauugugaaaauguag

SEQ ID NO: 33018 - RNA, 20 nt, Artificial Sequence
  HTT spacer sequence TTCN PAM
caauauacaugaaguuuuaa

SEQ ID NO: 33019 - RNA, 20 nt, Artificial Sequence
  HTT spacer sequence TTCN PAM
uaaguauggaugagcaucaa

SEQ ID NO: 33020 - RNA, 20 nt, Artificial Sequence
  HTT spacer sequence TTCN PAM
agaugauuuugaugcucauc

SEQ ID NO: 33021 - RNA, 20 nt, Artificial Sequence
  HTT spacer sequence TTCN PAM
uuacuguauuuuuaacaaau

SEQ ID NO: 33022 - RNA, 20 nt, Artificial Sequence
  HTT spacer sequence TTCN PAM
caaacauacuucugcauucu

SEQ ID NO: 33023 - RNA, 20 nt, Artificial Sequence
  HTT spacer sequence TTCN PAM
gcauucuguuugaguaggua

SEQ ID NO: 33024 - RNA, 20 nt, Artificial Sequence
  HTT spacer sequence TTCN PAM
guuugaguagguagggacua

SEQ ID NO: 33025 - RNA, 20 nt, Artificial Sequence
  HTT spacer sequence TTCN PAM
caaguauccucuugggaaua

SEQ ID NO: 33026 - RNA, 20 nt, Artificial Sequence
  HTT spacer sequence TTCN PAM
caagaggauacuugugaaaa

SEQ ID NO: 33027 - RNA, 20 nt, Artificial Sequence
  HTT spacer sequence TTCN PAM
uggguauucccaagaggaua

SEQ ID NO: 33028 - RNA, 20 nt, Artificial Sequence
  HTT spacer sequence TTCN PAM
agcugauuuaugcuaauaua

SEQ ID NO: 33029 - RNA, 20 nt, Artificial Sequence
  HTT spacer sequence TTCN PAM
caguagcaccaauauaucga

SEQ ID NO: 33030 - RNA, 20 nt, Artificial Sequence
  HTT spacer sequence TTCN PAM
auauauuggugcuacuguga

SEQ ID NO: 33031 - RNA, 20 nt, Artificial Sequence
  HTT spacer sequence TTCN PAM
uuagaguucgauauauuggu

SEQ ID NO: 33032 - RNA, 20 nt, Artificial Sequence
  HTT spacer sequence TTCN PAM
guuaauguuucugaaagaua

SEQ ID NO: 33033 - RNA, 20 nt, Artificial Sequence
  HTT spacer sequence TTCN PAM
gaaagauauaggugaccacu

SEQ ID NO: 33034 - RNA, 20 nt, Artificial Sequence
  HTT spacer sequence TTCN PAM
gaaacauuaacagaaguuuu

SEQ ID NO: 33035 - RNA, 20 nt, Artificial Sequence
  HTT spacer sequence TTCN PAM
agauaggaagauuuuauauu

SEQ ID NO: 33036 - RNA, 20 nt, Artificial Sequence
  HTT spacer sequence TTCN PAM
uaucuagaaaguggucaccu

SEQ ID NO: 33037 - RNA, 20 nt, Artificial Sequence
  HTT spacer sequence TTCN PAM
acuuaguaauauaaaaucuu

SEQ ID NO: 33038 - RNA, 20 nt, Artificial Sequence
  HTT spacer sequence TTCN PAM
cuaaauuaacacagaaauuu

SEQ ID NO: 33039 - RNA, 20 nt, Artificial Sequence
  HTT spacer sequence TTCN PAM
guguuaauuuagagaaaauu

SEQ ID NO: 33040 - RNA, 20 nt, Artificial Sequence
  HTT spacer sequence TTCN PAM
aguagagguauuuuugaacu

SEQ ID NO: 33041 - RNA, 20 nt, Artificial Sequence
  HTT spacer sequence TTCN PAM
aaaauaccucuacuagaauu

SEQ ID NO: 33042 - RNA, 20 nt, Artificial Sequence
  HTT spacer sequence TTCN PAM
cugcaagaauaaauacauaa

SEQ ID NO: 33043 - RNA, 20 nt, Artificial Sequence
  HTT spacer sequence TTCN PAM
ugcagugaacaaguucaaaa

SEQ ID NO: 33044 - RNA, 20 nt, Artificial Sequence
  HTT spacer sequence TTCN PAM
uugcaauuauguauuuauuc

SEQ ID NO: 33045 - RNA, 20 nt, Artificial Sequence
  HTT spacer sequence TTCN PAM
ccgcacugguccagcugguc

SEQ ID NO: 33046 - RNA, 20 nt, Artificial Sequence
  HTT spacer sequence TTCN PAM
ccugccucagccucccaagu

SEQ ID NO: 33047 - RNA, 20 nt, Artificial Sequence
  HTT spacer sequence TTCN PAM
agcaauucuccugccucagc

SEQ ID NO: 33048 - RNA, 20 nt, Artificial Sequence
  HTT spacer sequence TTCN PAM
agccugggcgacaagagcaa

SEQ ID NO: 33049 - RNA, 20 nt, Artificial Sequence
  HTT spacer sequence TTCN PAM
gucucaagaaaaaagagaaa

SEQ ID NO: 33050 - RNA, 20 nt, Artificial Sequence
  HTT spacer sequence TTCN PAM
ugagacagaauuuugcucuu

SEQ ID NO: 33051 - RNA, 20 nt, Artificial Sequence
  HTT spacer sequence TTCN PAM
cuuuuuucuugagacagaau

SEQ ID NO: 33052 - RNA, 20 nt, Artificial Sequence
  HTT spacer sequence TTCN PAM
uuuuucucuuuuuucuugag

SEQ ID NO: 33053 - RNA, 20 nt, Artificial Sequence
  HTT spacer sequence TTCN PAM
uuuucuuuuuucucuuuuuu

SEQ ID NO: 33054 - RNA, 20 nt, Artificial Sequence
  HTT spacer sequence TTCN PAM
auaccuguuuuaacauccaa

SEQ ID NO: 33055 - RNA, 20 nt, Artificial Sequence
  HTT spacer sequence TTCN PAM
guucuauaccuguuuuaaca

SEQ ID NO: 33056 - RNA, 20 nt, Artificial Sequence
  HTT spacer sequence TTCN PAM
uucuguucuauaccuguuuu

SEQ ID NO: 33057 - RNA, 20 nt, Artificial Sequence
  HTT spacer sequence TTCN PAM
uacagauacacacauacacu

SEQ ID NO: 33058 - RNA, 20 nt, Artificial Sequence
  HTT spacer sequence TTCN PAM
cuaauacauauauguuacac

SEQ ID NO: 33059 - RNA, 20 nt, Artificial Sequence
  HTT spacer sequence TTCN PAM
cucauuucccuaauacauau

SEQ ID NO: 33060 - RNA, 20 nt, Artificial Sequence
  HTT spacer sequence TTCN PAM
cugacuuugggagaacauua

SEQ ID NO: 33061 - RNA, 20 nt, Artificial Sequence
  HTT spacer sequence TTCN PAM
cccaaagucagagaaaugua

SEQ ID NO: 33062 - RNA, 20 nt, Artificial Sequence
  HTT spacer sequence TTCN PAM
gauuaauuaccuaaauguga

SEQ ID NO: 33063 - RNA, 20 nt, Artificial Sequence
  HTT spacer sequence TTCN PAM
cauuuagguaauuaaucuga

SEQ ID NO: 33064 - RNA, 20 nt, Artificial Sequence
  HTT spacer sequence TTCN PAM
uuuuuucacauuuagguaau

SEQ ID NO: 33065 - RNA, 20 nt, Artificial Sequence
  HTT spacer sequence TTCN PAM
uuaaaaaauguaaucuuagu

SEQ ID NO: 33066 - RNA, 20 nt, Artificial Sequence
  HTT spacer sequence TTCN PAM
ucaaacuaagauuacauuuu

SEQ ID NO: 33067 - RNA, 20 nt, Artificial Sequence
  HTT spacer sequence TTCN PAM
uuuauaauguuaaccuuccu

SEQ ID NO: 33068 - RNA, 20 nt, Artificial Sequence
  HTT spacer sequence TTCN PAM
acucaaaacaguuuuuuccu

SEQ ID NO: 33069 - RNA, 20 nt, Artificial Sequence
  HTT spacer sequence TTCN PAM
auaugucaaaauccaccuuc

SEQ ID NO: 33070 - RNA, 20 nt, Artificial Sequence
  HTT spacer sequence TTCN PAM
acaaaauugaaaguaaauug

SEQ ID NO: 33071 - RNA, 20 nt, Artificial Sequence
  HTT spacer sequence TTCN PAM
auuuuguugaagguggauuu

SEQ ID NO: 33072 - RNA, 20 nt, Artificial Sequence
  HTT spacer sequence TTCN PAM
auuuacuuucaauuuuguug

SEQ ID NO: 33073 - RNA, 20 nt, Artificial Sequence
  HTT spacer sequence TTCN PAM
ccaaguucaauuuacuuuca

SEQ ID NO: 33074 - RNA, 20 nt, Artificial Sequence
  HTT spacer sequence TTCN PAM
uaacgauauuuauaacugcu

SEQ ID NO: 33075 - RNA, 20 nt, Artificial Sequence
  HTT spacer sequence TTCN PAM
ccgacucccagccuccagaa

SEQ ID NO: 33076 - RNA, 20 nt, Artificial Sequence
  HTT spacer sequence TTCN PAM
ggaggcugggagucggagaa

SEQ ID NO: 33077 - RNA, 20 nt, Artificial Sequence
  HTT spacer sequence TTCN PAM
auaacaaaauaccacauaca

SEQ ID NO: 33078 - RNA, 20 nt, Artificial Sequence
  HTT spacer sequence TTCN PAM
gucuacugauuacuaguguc

SEQ ID NO: 33079 - RNA, 20 nt, Artificial Sequence
  HTT spacer sequence TTCN PAM
guuucagucuacugauuacu

SEQ ID NO: 33080 - RNA, 20 nt, Artificial Sequence
  HTT spacer sequence TTCN PAM
uauuuuuguuucaguuucag

SEQ ID NO: 33081 - RNA, 20 nt, Artificial Sequence
  HTT spacer sequence TTCN PAM
uaauguuugccaauuugaca

SEQ ID NO: 33082 - RNA, 20 nt, Artificial Sequence
  HTT spacer sequence TTCN PAM
gauuuuugucagaggugaua

SEQ ID NO: 33083 - RNA, 20 nt, Artificial Sequence
  HTT spacer sequence TTCN PAM
aagaaggcaauuugggaaaa

SEQ ID NO: 33084 - RNA, 20 nt, Artificial Sequence
  HTT spacer sequence TTCN PAM
uagaagguuguaucaccucu

SEQ ID NO: 33085 - RNA, 20 nt, Artificial Sequence
  HTT spacer sequence TTCN PAM
caaauugccuucuuagaagg

SEQ ID NO: 33086 - RNA, 20 nt, Artificial Sequence
  HTT spacer sequence TTCN PAM
uagggguaagcacccuagag

SEQ ID NO: 33087 - RNA, 20 nt, Artificial Sequence
  HTT spacer sequence TTCN PAM
ucccauuagaaaauuaaaaa

SEQ ID NO: 33088 - RNA, 20 nt, Artificial Sequence
  HTT spacer sequence TTCN PAM
aaugggaugaagggcacugc

SEQ ID NO: 33089 - RNA, 20 nt, Artificial Sequence
  HTT spacer sequence TTCN PAM
auccccuuuuagugguaggc

SEQ ID NO: 33090 - RNA, 20 nt, Artificial Sequence
  HTT spacer sequence TTCN PAM
cggguucaugugauucuccu

SEQ ID NO: 33091 - RNA, 20 nt, Artificial Sequence
  HTT spacer sequence TTCN PAM
ugugauucuccugccucagc

SEQ ID NO: 33092 - RNA, 20 nt, Artificial Sequence
  HTT spacer sequence TTCN PAM
ccugccucagccuccugagu

SEQ ID NO: 33093 - RNA, 20 nt, Artificial Sequence
  HTT spacer sequence TTCN PAM
cuguguuggccagacugguc

SEQ ID NO: 33094 - RNA, 20 nt, Artificial Sequence
  HTT spacer sequence TTCN PAM
agaccagucuggccaacaca

SEQ ID NO: 33095 - RNA, 20 nt, Artificial Sequence
  HTT spacer sequence TTCN PAM
cuuguauaaauguaucuggc

SEQ ID NO: 33096 - RNA, 20 nt, Artificial Sequence
  HTT spacer sequence TTCN PAM
uagauauuuauauuuuguuu

SEQ ID NO: 33097 - RNA, 20 nt, Artificial Sequence
  HTT spacer sequence TTCN PAM
ggcugcagugggcuaugauu

SEQ ID NO: 33098 - RNA, 20 nt, Artificial Sequence
  HTT spacer sequence TTCN PAM
gccucagccuuuugaguacc

SEQ ID NO: 33099 - RNA, 20 nt, Artificial Sequence
  HTT spacer sequence TTCN PAM
agaccagccugggcaauaca

SEQ ID NO: 33100 - RNA, 20 nt, Artificial Sequence
  HTT spacer sequence TTCN PAM
ugggcccaagugauccuccc

SEQ ID NO: 33101 - RNA, 20 nt, Artificial Sequence
  HTT spacer sequence TTCN PAM
gaccaauagauauuuauauu

SEQ ID NO: 33102 - RNA, 20 nt, Artificial Sequence
  HTT spacer sequence TTCN PAM
agucacaaauauaaauaucu

SEQ ID NO: 33103 - RNA, 20 nt, Artificial Sequence
  HTT spacer sequence TTCN PAM
guuaaaaaauaaugaaagau

SEQ ID NO: 33104 - RNA, 20 nt, Artificial Sequence
  HTT spacer sequence TTCN PAM
uuauuuuuuaacugaauuuu

SEQ ID NO: 33105 - RNA, 20 nt, Artificial Sequence
  HTT spacer sequence TTCN PAM
ggcuaagauagaauaacaag

SEQ ID NO: 33106 - RNA, 20 nt, Artificial Sequence
  HTT spacer sequence TTCN PAM
aucuuagccagaagcaaaaa

SEQ ID NO: 33107 - RNA, 20 nt, Artificial Sequence
  HTT spacer sequence TTCN PAM
ugccuugaaauaguugaaaa

SEQ ID NO: 33108 - RNA, 20 nt, Artificial Sequence
  HTT spacer sequence TTCN PAM
aggcaagaagauaaaugcug

SEQ ID NO: 33109 - RNA, 20 nt, Artificial Sequence
  HTT spacer sequence TTCN PAM
acuauuucaaggcaagaaga

SEQ ID NO: 33110 - RNA, 20 nt, Artificial Sequence
  HTT spacer sequence TTCN PAM
guuuucaacuauuucaaggc

SEQ ID NO: 33111 - RNA, 20 nt, Artificial Sequence
  HTT spacer sequence TTCN PAM
uccguuuucaacuauuucaa

SEQ ID NO: 33112 - RNA, 20 nt, Artificial Sequence
  HTT spacer sequence TTCN PAM
aguuauugggcaucaggcaa

SEQ ID NO: 33113 - RNA, 20 nt, Artificial Sequence
  HTT spacer sequence TTCN PAM
uugccugaugcccaauaacu

SEQ ID NO: 33114 - RNA, 20 nt, Artificial Sequence
  HTT spacer sequence TTCN PAM
ucuuugccugaugcccaaua

SEQ ID NO: 33115 - RNA, 20 nt, Artificial Sequence
  HTT spacer sequence TTCN PAM
ugggauaacuauucuucuuu

SEQ ID NO: 33116 - RNA, 20 nt, Artificial Sequence
  HTT spacer sequence TTCN PAM
uuuuccugggauaacuauuc

SEQ ID NO: 33117 - RNA, 20 nt, Artificial Sequence
  HTT spacer sequence TTCN PAM
uuacauuacugccuggucau

SEQ ID NO: 33118 - RNA, 20 nt, Artificial Sequence
  HTT spacer sequence TTCN PAM
ucuugccaugaccaggcagu

SEQ ID NO: 33119 - RNA, 20 nt, Artificial Sequence
  HTT spacer sequence TTCN PAM
auaugggcucucaccaccuu

SEQ ID NO: 33120 - RNA, 20 nt, Artificial Sequence
  HTT spacer sequence TTCN PAM
uccauaugggcucucaccac

SEQ ID NO: 33121 - RNA, 20 nt, Artificial Sequence
  HTT spacer sequence TTCN PAM
cugguauucuuccauauggg

SEQ ID NO: 33122 - RNA, 20 nt, Artificial Sequence
  HTT spacer sequence TTCN PAM
gcacaagcaagugcucguca

SEQ ID NO: 33123 - RNA, 20 nt, Artificial Sequence
  HTT spacer sequence TTCN PAM
gguggcucuaccuccagccc

SEQ ID NO: 33124 - RNA, 20 nt, Artificial Sequence
  HTT spacer sequence TTCN PAM
aauccuuucagguggcucua

SEQ ID NO: 33125 - RNA, 20 nt, Artificial Sequence
  HTT spacer sequence TTCN PAM
uucuaauccuuucagguggc

SEQ ID NO: 33126 - RNA, 20 nt, Artificial Sequence
  HTT spacer sequence TTCN PAM
gcaacuguuccuucuaaucc

SEQ ID NO: 33127 - RNA, 20 nt, Artificial Sequence
  HTT spacer sequence TTCN PAM
uggcccugugugacuuucag

SEQ ID NO: 33128 - RNA, 20 nt, Artificial Sequence
  HTT spacer sequence TTCN PAM
uccuggcccugugugacuuu

SEQ ID NO: 33129 - RNA, 20 nt, Artificial Sequence
  HTT spacer sequence TTCN PAM
aaucacaccaguuggagugg

SEQ ID NO: 33130 - RNA, 20 nt, Artificial Sequence
  HTT spacer sequence TTCN PAM
acuccaacuggugugauuag

SEQ ID NO: 33131 - RNA, 20 nt, Artificial Sequence
  HTT spacer sequence TTCN PAM
gaguacccuaccugcucuau

SEQ ID NO: 33132 - RNA, 20 nt, Artificial Sequence
  HTT spacer sequence TTCN PAM
uuacucugacccuaccuaau

SEQ ID NO: 33133 - RNA, 20 nt, Artificial Sequence
  HTT spacer sequence TTCN PAM
caacaaaaauaauauauuuc

SEQ ID NO: 33134 - RNA, 20 nt, Artificial Sequence
  HTT spacer sequence TTCN PAM
guguuuguaacacguagaag

SEQ ID NO: 33135 - RNA, 20 nt, Artificial Sequence
  HTT spacer sequence TTCN PAM
acguguuacaaacacugaaa

SEQ ID NO: 33136 - RNA, 20 nt, Artificial Sequence
  HTT spacer sequence TTCN PAM
cuucuacguguuacaaacac

SEQ ID NO: 33137 - RNA, 20 nt, Artificial Sequence
  HTT spacer sequence TTCN PAM
agccuuuaugcuauugucau

SEQ ID NO: 33138 - RNA, 20 nt, Artificial Sequence
  HTT spacer sequence TTCN PAM
gcucuuccagccuuuaugcu

SEQ ID NO: 33139 - RNA, 20 nt, Artificial Sequence
  HTT spacer sequence TTCN PAM
gcccagcgcaaauacauguc

SEQ ID NO: 33140 - RNA, 20 nt, Artificial Sequence
  HTT spacer sequence TTCN PAM
ccaaaagauaucaaguccua

SEQ ID NO: 33141 - RNA, 20 nt, Artificial Sequence
  HTT spacer sequence TTCN PAM
auauaaaguaauauuuacag

SEQ ID NO: 33142 - RNA, 20 nt, Artificial Sequence
  HTT spacer sequence TTCN PAM
ggaucuugagaugagggggc

SEQ ID NO: 33143 - RNA, 20 nt, Artificial Sequence
  HTT spacer sequence TTCN PAM
cucuguguguaaaaucuccc

SEQ ID NO: 33144 - RNA, 20 nt, Artificial Sequence
  HTT spacer sequence TTCN PAM
cagggccuucucucugugug

SEQ ID NO: 33145 - RNA, 20 nt, Artificial Sequence
  HTT spacer sequence TTCN PAM
aucuucacagggccuucucu

SEQ ID NO: 33146 - RNA, 20 nt, Artificial Sequence
  HTT spacer sequence TTCN PAM
guuccaucuucacagggccu

SEQ ID NO: 33147 - RNA, 20 nt, Artificial Sequence
  HTT spacer sequence TTCN PAM
aaucuuucuguuccaucuuc

SEQ ID NO: 33148 - RNA, 20 nt, Artificial Sequence
  HTT spacer sequence TTCN PAM
aggccagcaccuucaaaucu

SEQ ID NO: 33149 - RNA, 20 nt, Artificial Sequence
  HTT spacer sequence TTCN PAM
ucacuccaauuuucaaggcc

SEQ ID NO: 33150 - RNA, 20 nt, Artificial Sequence
  HTT spacer sequence TTCN PAM
uuggcuuauagcuucaucac

SEQ ID NO: 33151 - RNA, 20 nt, Artificial Sequence
  HTT spacer sequence TTCN PAM
agcuuugguggcugcugcau

SEQ ID NO: 33152 - RNA, 20 nt, Artificial Sequence
  HTT spacer sequence TTCN PAM
cauuuagagccuacuccaga

SEQ ID NO: 33153 - RNA, 20 nt, Artificial Sequence
  HTT spacer sequence TTCN PAM
cucuggaguaggcucuaaau

SEQ ID NO: 33154 - RNA, 20 nt, Artificial Sequence
  HTT spacer sequence TTCN PAM
uuuuuuuuuuuuuuuuuuaa

SEQ ID NO: 33155 - RNA, 20 nt, Artificial Sequence
  HTT spacer sequence TTCN PAM
uggguguuucuuggagaggg

SEQ ID NO: 33156 - RNA, 20 nt, Artificial Sequence
  HTT spacer sequence TTCN PAM
uggagagggggauuuggcag

SEQ ID NO: 33157 - RNA, 20 nt, Artificial Sequence
  HTT spacer sequence TTCN PAM
cuccacuauuguccuaugac

SEQ ID NO: 33158 - RNA, 20 nt, Artificial Sequence
  HTT spacer sequence TTCN PAM
uaggcagagggcccugccac

SEQ ID NO: 33159 - RNA, 20 nt, Artificial Sequence
  HTT spacer sequence TTCN PAM
gcaguguuugugucccuggg

SEQ ID NO: 33160 - RNA, 20 nt, Artificial Sequence
  HTT spacer sequence TTCN PAM
agcaucuguuuaacaaagca

SEQ ID NO: 33161 - RNA, 20 nt, Artificial Sequence
  HTT spacer sequence TTCN PAM
gagagcacgggguugggggu

SEQ ID NO: 33162 - RNA, 20 nt, Artificial Sequence
  HTT spacer sequence TTCN PAM
gccuugggaugcuguuaauc

SEQ ID NO: 33163 - RNA, 20 nt, Artificial Sequence
  HTT spacer sequence TTCN PAM
ucugccuugggaugcuguua

SEQ ID NO: 33164 - RNA, 20 nt, Artificial Sequence
  HTT spacer sequence TTCN PAM
uaguacagaacaaaauggag

SEQ ID NO: 33165 - RNA, 20 nt, Artificial Sequence
  HTT spacer sequence TTCN PAM
guacuaagaaaaauucuucu

SEQ ID NO: 33166 - RNA, 20 nt, Artificial Sequence
  HTT spacer sequence TTCN PAM
uucuacgcagacacaguaac

SEQ ID NO: 33167 - RNA, 20 nt, Artificial Sequence
  HTT spacer sequence TTCN PAM
acgcagacacaguaacaauc

SEQ ID NO: 33168 - RNA, 20 nt, Artificial Sequence
  HTT spacer sequence TTCN PAM
uuucccacauuuccuccuuu

SEQ ID NO: 33169 - RNA, 20 nt, Artificial Sequence
  HTT spacer sequence TTCN PAM
cacauuuccuccuuuucuau

SEQ ID NO: 33170 - RNA, 20 nt, Artificial Sequence
  HTT spacer sequence TTCN PAM
uccuuuucuauucgacaaaa

SEQ ID NO: 33171 - RNA, 20 nt, Artificial Sequence
  HTT spacer sequence TTCN PAM
auucgacaaaacugccaccg

SEQ ID NO: 33172 - RNA, 20 nt, Artificial Sequence
  HTT spacer sequence TTCN PAM
acaaaacugccaccgucauc

SEQ ID NO: 33173 - RNA, 20 nt, Artificial Sequence
  HTT spacer sequence TTCN PAM
caaugagcuauuggguacac

SEQ ID NO: 33174 - RNA, 20 nt, Artificial Sequence
  HTT spacer sequence TTCN PAM
cagauggggcggccgggcag

SEQ ID NO: 33175 - RNA, 20 nt, Artificial Sequence
  HTT spacer sequence TTCN PAM
cggacggggcggcugcuggg

SEQ ID NO: 33176 - RNA, 20 nt, Artificial Sequence
  HTT spacer sequence TTCN PAM
cagacggggcggcuggucag

SEQ ID NO: 33177 - RNA, 20 nt, Artificial Sequence
  HTT spacer sequence TTCN PAM
uaaguucccagacggaguca

SEQ ID NO: 33178 - RNA, 20 nt, Artificial Sequence
  HTT spacer sequence TTCN PAM
cagacggagucacggccggg

SEQ ID NO: 33179 - RNA, 20 nt, Artificial Sequence
  HTT spacer sequence TTCN PAM
caucucagacggggcggcgg

SEQ ID NO: 33180 - RNA, 20 nt, Artificial Sequence
  HTT spacer sequence TTCN PAM
cagacgaugggcggccgggc

SEQ ID NO: 33181 - RNA, 20 nt, Artificial Sequence
  HTT spacer sequence TTCN PAM
uagaugggaugacagccggg

SEQ ID NO: 33182 - RNA, 20 nt, Artificial Sequence
  HTT spacer sequence TTCN PAM
cggcugucaucccaucuagg

SEQ ID NO: 33183 - RNA, 20 nt, Artificial Sequence
  HTT spacer sequence TTCN PAM
cagacugggcagccaggcag

SEQ ID NO: 33184 - RNA, 20 nt, Artificial Sequence
  HTT spacer sequence TTCN PAM
gccuggccgcccaucgucug

SEQ ID NO: 33185 - RNA, 20 nt, Artificial Sequence
  HTT spacer sequence TTCN PAM
uagacgggguggcggcuggg

SEQ ID NO: 33186 - RNA, 20 nt, Artificial Sequence
  HTT spacer sequence TTCN PAM
ccucccagccgccugccuug

SEQ ID NO: 33187 - RNA, 20 nt, Artificial Sequence
  HTT spacer sequence TTCN PAM
ccguguuggccgggcugguc

SEQ ID NO: 33188 - RNA, 20 nt, Artificial Sequence
  HTT spacer sequence TTCN PAM
uguuuuuugguggagacggg

SEQ ID NO: 33189 - RNA, 20 nt, Artificial Sequence
  HTT spacer sequence TTCN PAM
ccugccucagccugccaagu

SEQ ID NO: 33190 - RNA, 20 nt, Artificial Sequence
  HTT spacer sequence TTCN PAM
cucgcccucgcccucgcccu

SEQ ID NO: 33191 - RNA, 20 nt, Artificial Sequence
  HTT spacer sequence TTCN PAM
uuaauuucaguuuagugaua

SEQ ID NO: 33192 - RNA, 20 nt, Artificial Sequence
  HTT spacer sequence TTCN PAM
guuuagugauacuaauuuug

SEQ ID NO: 33193 - RNA, 20 nt, Artificial Sequence
  HTT spacer sequence TTCN PAM
caguuuuagaggccagaguc

SEQ ID NO: 33194 - RNA, 20 nt, Artificial Sequence
  HTT spacer sequence TTCN PAM
uucacaguuuuagaggccag

SEQ ID NO: 33195 - RNA, 20 nt, Artificial Sequence
  HTT spacer sequence TTCN PAM
uuuaagccacauaguuugug

SEQ ID NO: 33196 - RNA, 20 nt, Artificial Sequence
  HTT spacer sequence TTCN PAM
ugcagcugcuguaacaaauu

SEQ ID NO: 33197 - RNA, 20 nt, Artificial Sequence
  HTT spacer sequence TTCN PAM
caugcagcauaaauuaguuu

SEQ ID NO: 33198 - RNA, 20 nt, Artificial Sequence
  HTT spacer sequence TTCN PAM
ucacaaucuaccuuauuaca

SEQ ID NO: 33199 - RNA, 20 nt, Artificial Sequence
  HTT spacer sequence TTCN PAM
uuguugugcuuuuaguuguu

SEQ ID NO: 33200 - RNA, 20 nt, Artificial Sequence
  HTT spacer sequence TTCN PAM
uuagcuauaauuccuuguug

SEQ ID NO: 33201 - RNA, 20 nt, Artificial Sequence
  HTT spacer sequence TTCN PAM
aaucuccuuuuuugguucau

SEQ ID NO: 33202 - RNA, 20 nt, Artificial Sequence
  HTT spacer sequence TTCN PAM
ccauuuuuauuauucuaauc

SEQ ID NO: 33203 - RNA, 20 nt, Artificial Sequence
  HTT spacer sequence TTCN PAM
uugggauucaccauuuuuau

SEQ ID NO: 33204 - RNA, 20 nt, Artificial Sequence
  HTT spacer sequence TTCN PAM
ggcuucuuugggauucacca

SEQ ID NO: 33205 - RNA, 20 nt, Artificial Sequence
  HTT spacer sequence TTCN PAM
ccuauuucuggcuucuuugg

SEQ ID NO: 33206 - RNA, 20 nt, Artificial Sequence
  HTT spacer sequence TTCN PAM
uuuauuugccucuuccccua

SEQ ID NO: 33207 - RNA, 20 nt, Artificial Sequence
  HTT spacer sequence TTCN PAM
uuccuuuauuugccucuucc

SEQ ID NO: 33208 - RNA, 20 nt, Artificial Sequence
  HTT spacer sequence TTCN PAM
accuaacuaugucaaaaagg

SEQ ID NO: 33209 - RNA, 20 nt, Artificial Sequence
  HTT spacer sequence TTCN PAM
gauugaauggaaaaguaaga

SEQ ID NO: 33210 - RNA, 20 nt, Artificial Sequence
  HTT spacer sequence TTCN PAM
aucugaaaaaucgcugccuu

SEQ ID NO: 33211 - RNA, 20 nt, Artificial Sequence
  HTT spacer sequence TTCN PAM
auucaaucugaaaaaucgcu

SEQ ID NO: 33212 - RNA, 20 nt, Artificial Sequence
  HTT spacer sequence TTCN PAM
ugcaggcagcagcauauacc

SEQ ID NO: 33213 - RNA, 20 nt, Artificial Sequence
  HTT spacer sequence TTCN PAM
aaauauaaaggcaaaaauaa

SEQ ID NO: 33214 - RNA, 20 nt, Artificial Sequence
  HTT spacer sequence TTCN PAM
guuaccuguagguuauuuuu

SEQ ID NO: 33215 - RNA, 20 nt, Artificial Sequence
  HTT spacer sequence TTCN PAM
guucuguuaccuguagguua

SEQ ID NO: 33216 - RNA, 20 nt, Artificial Sequence
  HTT spacer sequence TTCN PAM
uuccguucuguuaccuguag

SEQ ID NO: 33217 - RNA, 20 nt, Artificial Sequence
  HTT spacer sequence TTCN PAM
cugugcuuacaagaauuaga

SEQ ID NO: 33218 - RNA, 20 nt, Artificial Sequence
  HTT spacer sequence TTCN PAM
uguaagcacagugaacuucu

SEQ ID NO: 33219 - RNA, 20 nt, Artificial Sequence
  HTT spacer sequence TTCN PAM
guuaauaucagacaaagugg

SEQ ID NO: 33220 - RNA, 20 nt, Artificial Sequence
  HTT spacer sequence TTCN PAM
aagcaaaggcucuugcccag

SEQ ID NO: 33221 - RNA, 20 nt, Artificial Sequence
  HTT spacer sequence TTCN PAM
uaaugaugaaggggauucgu

SEQ ID NO: 33222 - RNA, 20 nt, Artificial Sequence
  HTT spacer sequence TTCN PAM
ucauuaugaaaugaccaucu

SEQ ID NO: 33223 - RNA, 20 nt, Artificial Sequence
  HTT spacer sequence TTCN PAM
uucaucagccuggcauagca

SEQ ID NO: 33224 - RNA, 20 nt, Artificial Sequence
  HTT spacer sequence TTCN PAM
ucagccuggcauagcaagcu

SEQ ID NO: 33225 - RNA, 20 nt, Artificial Sequence
  HTT spacer sequence TTCN PAM
gcuugcuaugccaggcugau

SEQ ID NO: 33226 - RNA, 20 nt, Artificial Sequence
  HTT spacer sequence TTCN PAM
uguauuuuagcucuguaguc

SEQ ID NO: 33227 - RNA, 20 nt, Artificial Sequence
  HTT spacer sequence TTCN PAM
gucaggcuuugcuucaugua

SEQ ID NO: 33228 - RNA, 20 nt, Artificial Sequence
  HTT spacer sequence TTCN PAM
acuuguaguucugucaggcu

SEQ ID NO: 33229 - RNA, 20 nt, Artificial Sequence
  HTT spacer sequence TTCN PAM
guagccgcucucaaugauuu

SEQ ID NO: 33230 - RNA, 20 nt, Artificial Sequence
  HTT spacer sequence TTCN PAM
acaaaucauugagagcggcu

SEQ ID NO: 33231 - RNA, 20 nt, Artificial Sequence
  HTT spacer sequence TTCN PAM
agauccagauauuauggcua

SEQ ID NO: 33232 - RNA, 20 nt, Artificial Sequence
  HTT spacer sequence TTCN PAM
gcuggugcuggguggagugu

SEQ ID NO: 33233 - RNA, 20 nt, Artificial Sequence
  HTT spacer sequence TTCN PAM
gugagcacuugagagagugu

SEQ ID NO: 33234 - RNA, 20 nt, Artificial Sequence
  HTT spacer sequence TTCN PAM
aauuauucagaguauguuuu

SEQ ID NO: 33235 - RNA, 20 nt, Artificial Sequence
  HTT spacer sequence TTCN PAM
gaguauguuuucugaccuca

SEQ ID NO: 33236 - RNA, 20 nt, Artificial Sequence
  HTT spacer sequence TTCN PAM
gaccucaguaucauuaaguu

SEQ ID NO: 33237 - RNA, 20 nt, Artificial Sequence
  HTT spacer sequence TTCN PAM
aacuuaaugauacugagguc

SEQ ID NO: 33238 - RNA, 20 nt, Artificial Sequence
  HTT spacer sequence TTCN PAM
uauaauauauuccaacuuaa

SEQ ID NO: 33239 - RNA, 20 nt, Artificial Sequence
  HTT spacer sequence TTCN PAM
agguuaucuuccuauaauau

SEQ ID NO: 33240 - RNA, 20 nt, Artificial Sequence
  HTT spacer sequence TTCN PAM
acauaucugaggcuuuucca

SEQ ID NO: 33241 - RNA, 20 nt, Artificial Sequence
  HTT spacer sequence TTCN PAM
acauggcccaugggucagaa

SEQ ID NO: 33242 - RNA, 20 nt, Artificial Sequence
  HTT spacer sequence TTCN PAM
gacccaugggccauguggaa

SEQ ID NO: 33243 - RNA, 20 nt, Artificial Sequence
  HTT spacer sequence TTCN PAM
cuucugacccaugggccaug

SEQ ID NO: 33244 - RNA, 20 nt, Artificial Sequence
  HTT spacer sequence TTCN PAM
cuuuugacuucacuucugac

SEQ ID NO: 33245 - RNA, 20 nt, Artificial Sequence
  HTT spacer sequence TTCN PAM
aauuucccuuuugacuucac

SEQ ID NO: 33246 - RNA, 20 nt, Artificial Sequence
  HTT spacer sequence TTCN PAM
aaacuuguggggugcuguua

SEQ ID NO: 33247 - RNA, 20 nt, Artificial Sequence
  HTT spacer sequence TTCN PAM
auuuacuaugcuguaacagc

SEQ ID NO: 33248 - RNA, 20 nt, Artificial Sequence
  HTT spacer sequence TTCN PAM
agcauuaaaugccuguuuua

SEQ ID NO: 33249 - RNA, 20 nt, Artificial Sequence
  HTT spacer sequence TTCN PAM
uaaaacaggcauuuaaugcu

SEQ ID NO: 33250 - RNA, 20 nt, Artificial Sequence
  HTT spacer sequence TTCN PAM
uuccuaaaacaggcauuuaa

SEQ ID NO: 33251 - RNA, 20 nt, Artificial Sequence
  HTT spacer sequence TTCN PAM
aaucaaugaccucagcuucu

SEQ ID NO: 33252 - RNA, 20 nt, Artificial Sequence
  HTT spacer sequence TTCN PAM
accuuuggaaacuugaaaau

SEQ ID NO: 33253 - RNA, 20 nt, Artificial Sequence
  HTT spacer sequence TTCN PAM
aaagguagaagcugagguca

SEQ ID NO: 33254 - RNA, 20 nt, Artificial Sequence
  HTT spacer sequence TTCN PAM
aguuuccaaagguagaagcu

SEQ ID NO: 33255 - RNA, 20 nt, Artificial Sequence
  HTT spacer sequence TTCN PAM
auuugcuugucauuuucaag

SEQ ID NO: 33256 - RNA, 20 nt, Artificial Sequence
  HTT spacer sequence TTCN PAM
gguaacucuggauuccauuu

SEQ ID NO: 33257 - RNA, 20 nt, Artificial Sequence
  HTT spacer sequence TTCN PAM
gccacuuugggaggccgagg

SEQ ID NO: 33258 - RNA, 20 nt, Artificial Sequence
  HTT spacer sequence TTCN PAM
acugccagucucaaacaauc

SEQ ID NO: 33259 - RNA, 20 nt, Artificial Sequence
  HTT spacer sequence TTCN PAM
cugcagccucaaccucccag

SEQ ID NO: 33260 - RNA, 20 nt, Artificial Sequence
  HTT spacer sequence TTCN PAM
auccugggcaacagaaugag

SEQ ID NO: 33261 - RNA, 20 nt, Artificial Sequence
  HTT spacer sequence TTCN PAM
guugcccaggauggaacaca

SEQ ID NO: 33262 - RNA, 20 nt, Artificial Sequence
  HTT spacer sequence TTCN PAM
aguaacuguuuuuguuuuug

SEQ ID NO: 33263 - RNA, 20 nt, Artificial Sequence
  HTT spacer sequence TTCN PAM
ucuaguaacuguuuuuguuu

SEQ ID NO: 33264 - RNA, 20 nt, Artificial Sequence
  HTT spacer sequence TTCN PAM
gcuccuaucuuuaugauguc

SEQ ID NO: 33265 - RNA, 20 nt, Artificial Sequence
  HTT spacer sequence TTCN PAM
auuuuacugacuucugcucc

SEQ ID NO: 33266 - RNA, 20 nt, Artificial Sequence
  HTT spacer sequence TTCN PAM
uauguauuuuuguuuucuau

SEQ ID NO: 33267 - RNA, 20 nt, Artificial Sequence
  HTT spacer sequence TTCN PAM
ucaagaacaucaauaaauug

SEQ ID NO: 33268 - RNA, 20 nt, Artificial Sequence
  HTT spacer sequence TTCN PAM
ugaugaaccagcuuuugguu

SEQ ID NO: 33269 - RNA, 20 nt, Artificial Sequence
  HTT spacer sequence TTCN PAM
uaucagcuuuaccaauuuau

SEQ ID NO: 33270 - RNA, 20 nt, Artificial Sequence
  HTT spacer sequence TTCN PAM
cuguuuuuccuaucagcuuu

SEQ ID NO: 33271 - RNA, 20 nt, Artificial Sequence
  HTT spacer sequence TTCN PAM
ugauauugcuaauuugugac

SEQ ID NO: 33272 - RNA, 20 nt, Artificial Sequence
  HTT spacer sequence TTCN PAM
cgccuguaaucccagcaccu

SEQ ID NO: 33273 - RNA, 20 nt, Artificial Sequence
  HTT spacer sequence TTCN PAM
ccauguuggccaggcugguc

SEQ ID NO: 33274 - RNA, 20 nt, Artificial Sequence
  HTT spacer sequence TTCN PAM
ccugccucagccucccaagu

SEQ ID NO: 33275 - RNA, 20 nt, Artificial Sequence
  HTT spacer sequence TTCN PAM
agcaauucuccugccucagc

SEQ ID NO: 33276 - RNA, 20 nt, Artificial Sequence
  HTT spacer sequence TTCN PAM
uaauauuaccauauaguccu

SEQ ID NO: 33277 - RNA, 20 nt, Artificial Sequence
  HTT spacer sequence TTCN PAM
ucuauaaguugucaaauuua

SEQ ID NO: 33278 - RNA, 20 nt, Artificial Sequence
  HTT spacer sequence TTCN PAM
uugaaagacacagaaacuau

SEQ ID NO: 33279 - RNA, 20 nt, Artificial Sequence
  HTT spacer sequence TTCN PAM
aggaacucauccauuucauc

SEQ ID NO: 33280 - RNA, 20 nt, Artificial Sequence
  HTT spacer sequence TTCN PAM
gugucuuucaaggaacucau

SEQ ID NO: 33281 - RNA, 20 nt, Artificial Sequence
  HTT spacer sequence TTCN PAM
ugagagagcuuuaauaguuu

SEQ ID NO: 33282 - RNA, 20 nt, Artificial Sequence
  HTT spacer sequence TTCN PAM
auaaaauagauauagggcua

SEQ ID NO: 33283 - RNA, 20 nt, Artificial Sequence
  HTT spacer sequence TTCN PAM
aguaacuaaauauugauuuu

SEQ ID NO: 33284 - RNA, 20 nt, Artificial Sequence
  HTT spacer sequence TTCN PAM
aaccacacuuaaaaguuuuc

SEQ ID NO: 33285 - RNA, 20 nt, Artificial Sequence
  HTT spacer sequence TTCN PAM
uauaccauuuccaaccacac

SEQ ID NO: 33286 - RNA, 20 nt, Artificial Sequence
  HTT spacer sequence TTCN PAM
acugaauuuuaugaagucua

SEQ ID NO: 33287 - RNA, 20 nt, Artificial Sequence
  HTT spacer sequence TTCN PAM
guugaaaaaguucguauacc

SEQ ID NO: 33288 - RNA, 20 nt, Artificial Sequence
  HTT spacer sequence TTCN PAM
uaaaauucaguugaaaaagu

SEQ ID NO: 33289 - RNA, 20 nt, Artificial Sequence
  HTT spacer sequence TTCN PAM
gaugaaaauuuagugucuga

SEQ ID NO: 33290 - RNA, 20 nt, Artificial Sequence
  HTT spacer sequence TTCN PAM
ucagaaaaccuuuaccugug

SEQ ID NO: 33291 - RNA, 20 nt, Artificial Sequence
  HTT spacer sequence TTCN PAM
gacacuaaauuuucaucaga

SEQ ID NO: 33292 - RNA, 20 nt, Artificial Sequence
  HTT spacer sequence TTCN PAM
ucacauuaauuacauguuga

SEQ ID NO: 33293 - RNA, 20 nt, Artificial Sequence
  HTT spacer sequence TTCN PAM
cauuaauuacauguugaaau

SEQ ID NO: 33294 - RNA, 20 nt, Artificial Sequence
  HTT spacer sequence TTCN PAM
acauguaauuaaugugaaga

SEQ ID NO: 33295 - RNA, 20 nt, Artificial Sequence
  HTT spacer sequence TTCN PAM
uaauauuuaauuuaacccaa

SEQ ID NO: 33296 - RNA, 20 nt, Artificial Sequence
  HTT spacer sequence TTCN PAM
uuuuacuuuugaugcgucag

SEQ ID NO: 33297 - RNA, 20 nt, Artificial Sequence
  HTT spacer sequence TTCN PAM
uagcugacgcaucaaaagua

SEQ ID NO: 33298 - RNA, 20 nt, Artificial Sequence
  HTT spacer sequence TTCN PAM
guuucuguugacaguacugc

SEQ ID NO: 33299 - RNA, 20 nt, Artificial Sequence
  HTT spacer sequence TTCN PAM
guugacaguacugcuuugga

SEQ ID NO: 33300 - RNA, 20 nt, Artificial Sequence
  HTT spacer sequence TTCN PAM
aacacugugcuccaaagcag

SEQ ID NO: 33301 - RNA, 20 nt, Artificial Sequence
  HTT spacer sequence TTCN PAM
aagaccuuuccucaguucgu

SEQ ID NO: 33302 - RNA, 20 nt, Artificial Sequence
  HTT spacer sequence TTCN PAM
ucaguucguuauucauggcu

SEQ ID NO: 33303 - RNA, 20 nt, Artificial Sequence
  HTT spacer sequence TTCN PAM
uuauucauggcugucuguau

SEQ ID NO: 33304 - RNA, 20 nt, Artificial Sequence
  HTT spacer sequence TTCN PAM
uggcugucuguauuccacau

SEQ ID NO: 33305 - RNA, 20 nt, Artificial Sequence
  HTT spacer sequence TTCN PAM
acauagauaaggucugaaau

SEQ ID NO: 33306 - RNA, 20 nt, Artificial Sequence
  HTT spacer sequence TTCN PAM
gaccuuaucuauguggaaua

SEQ ID NO: 33307 - RNA, 20 nt, Artificial Sequence
  HTT spacer sequence TTCN PAM
aaccauuguuugcaauuuuu

SEQ ID NO: 33308 - RNA, 20 nt, Artificial Sequence
  HTT spacer sequence TTCN PAM
cuuuaucucuagguaaaaau

SEQ ID NO: 33309 - RNA, 20 nt, Artificial Sequence
  HTT spacer sequence TTCN PAM
gaguaguuagauugggauca

SEQ ID NO: 33310 - RNA, 20 nt, Artificial Sequence
  HTT spacer sequence TTCN PAM
ugaucccaaucuaacuacuc

SEQ ID NO: 33311 - RNA, 20 nt, Artificial Sequence
  HTT spacer sequence TTCN PAM
aaaauagcacaucccccgua

SEQ ID NO: 33312 - RNA, 20 nt, Artificial Sequence
  HTT spacer sequence TTCN PAM
ugggauuacuucaagaacau

SEQ ID NO: 33313 - RNA, 20 nt, Artificial Sequence
  HTT spacer sequence TTCN PAM
agaacauccuuguguuacug

SEQ ID NO: 33314 - RNA, 20 nt, Artificial Sequence
  HTT spacer sequence TTCN PAM
ugaaguaaucccaagaauag

SEQ ID NO: 33315 - RNA, 20 nt, Artificial Sequence
  HTT spacer sequence TTCN PAM
gaaugcugugaagucaguuu

SEQ ID NO: 33316 - RNA, 20 nt, Artificial Sequence
  HTT spacer sequence TTCN PAM
gaagcauccaaaccaguaac

SEQ ID NO: 33317 - RNA, 20 nt, Artificial Sequence
  HTT spacer sequence TTCN PAM
cagcauucagaagcauccaa

SEQ ID NO: 33318 - RNA, 20 nt, Artificial Sequence
  HTT spacer sequence TTCN PAM
uguacauggcucaucaguuu

SEQ ID NO: 33319 - RNA, 20 nt, Artificial Sequence
  HTT spacer sequence TTCN PAM
uucaauuaaacauuuuaaaa

SEQ ID NO: 33320 - RNA, 20 nt, Artificial Sequence
  HTT spacer sequence TTCN PAM
auuaaacauuuuaaaauagu

SEQ ID NO: 33321 - RNA, 20 nt, Artificial Sequence
  HTT spacer sequence TTCN PAM
cccuaagaugccagaugauc

SEQ ID NO: 33322 - RNA, 20 nt, Artificial Sequence
  HTT spacer sequence TTCN PAM
guaugggccaaaguauaacc

SEQ ID NO: 33323 - RNA, 20 nt, Artificial Sequence
  HTT spacer sequence TTCN PAM
gcagucuaucucuccugccc

SEQ ID NO: 33324 - RNA, 20 nt, Artificial Sequence
  HTT spacer sequence TTCN PAM
agguuccaagaauauuguag

SEQ ID NO: 33325 - RNA, 20 nt, Artificial Sequence
  HTT spacer sequence TTCN PAM
aagaauauuguagguuaaga

SEQ ID NO: 33326 - RNA, 20 nt, Artificial Sequence
  HTT spacer sequence TTCN PAM
uggaaccuugaaaaucaguu

SEQ ID NO: 33327 - RNA, 20 nt, Artificial Sequence
  HTT spacer sequence TTCN PAM
accaaaaguuuacuuuuacu

SEQ ID NO: 33328 - RNA, 20 nt, Artificial Sequence
  HTT spacer sequence TTCN PAM
auccuagacaacccacugcu

SEQ ID NO: 33329 - RNA, 20 nt, Artificial Sequence
  HTT spacer sequence TTCN PAM
gauacuucaauccuagacaa

SEQ ID NO: 33330 - RNA, 20 nt, Artificial Sequence
  HTT spacer sequence TTCN PAM
uuuaaaaacuucagauacuu

SEQ ID NO: 33331 - RNA, 20 nt, Artificial Sequence
  HTT spacer sequence TTCN PAM
uuuuaaauuuucguuuaaaa

SEQ ID NO: 33332 - RNA, 20 nt, Artificial Sequence
  HTT spacer sequence TTCN PAM
cauuuuucuuuuuaaauuuu

SEQ ID NO: 33333 - RNA, 20 nt, Artificial Sequence
  HTT spacer sequence TTCN PAM
uuuuuaaaaaauaaacuuua

SEQ ID NO: 33334 - RNA, 20 nt, Artificial Sequence
  HTT spacer sequence TTCN PAM
aaauaaaguuuauuuuuuaa

SEQ ID NO: 33335 - RNA, 20 nt, Artificial Sequence
  HTT spacer sequence TTCN PAM
auaaaucuaaaacuauuuca

SEQ ID NO: 33336 - RNA, 20 nt, Artificial Sequence
  HTT spacer sequence TTCN PAM
uacccuaucuaauuuuuuuc

SEQ ID NO: 33337 - RNA, 20 nt, Artificial Sequence
  HTT spacer sequence TTCN PAM
uauacccuacauccaguuac

SEQ ID NO: 33338 - RNA, 20 nt, Artificial Sequence
  HTT spacer sequence TTCN PAM
uguuuaaugaaucaauauug

SEQ ID NO: 33339 - RNA, 20 nt, Artificial Sequence
  HTT spacer sequence TTCN PAM
uuaaacaugaaaaugucuca

SEQ ID NO: 33340 - RNA, 20 nt, Artificial Sequence
  HTT spacer sequence TTCN PAM
gauuuucuuaauuucuaugu

SEQ ID NO: 33341 - RNA, 20 nt, Artificial Sequence
  HTT spacer sequence TTCN PAM
uaauuucuauguaauguccu

SEQ ID NO: 33342 - RNA, 20 nt, Artificial Sequence
  HTT spacer sequence TTCN PAM
auguaauguccuuuuucugu

SEQ ID NO: 33343 - RNA, 20 nt, Artificial Sequence
  HTT spacer sequence TTCN PAM
guuccagaauuccaugcagg

SEQ ID NO: 33344 - RNA, 20 nt, Artificial Sequence
  HTT spacer sequence TTCN PAM
agaauuccaugcaggacacc

SEQ ID NO: 33345 - RNA, 20 nt, Artificial Sequence
  HTT spacer sequence TTCN PAM
ggaacagaaaaaggacauua

SEQ ID NO: 33346 - RNA, 20 nt, Artificial Sequence
  HTT spacer sequence TTCN PAM
augcaggacaccggauaccu

SEQ ID NO: 33347 - RNA, 20 nt, Artificial Sequence
  HTT spacer sequence TTCN PAM
uugucaugucaccuuaggcu

SEQ ID NO: 33348 - RNA, 20 nt, Artificial Sequence
  HTT spacer sequence TTCN PAM
cuucuuuuuuugcuuagaaa

SEQ ID NO: 33349 - RNA, 20 nt, Artificial Sequence
  HTT spacer sequence TTCN PAM
uuuuuugcuuagaaauucuc

SEQ ID NO: 33350 - RNA, 20 nt, Artificial Sequence
  HTT spacer sequence TTCN PAM
aagcaaaaaaagaagagaaa

SEQ ID NO: 33351 - RNA, 20 nt, Artificial Sequence
  HTT spacer sequence TTCN PAM
ccagaauuucagaaacuucu

SEQ ID NO: 33352 - RNA, 20 nt, Artificial Sequence
  HTT spacer sequence TTCN PAM
ggagaauuucuaagcaaaaa

SEQ ID NO: 33353 - RNA, 20 nt, Artificial Sequence
  HTT spacer sequence TTCN PAM
gaaacuucugggcaucgcua

SEQ ID NO: 33354 - RNA, 20 nt, Artificial Sequence
  HTT spacer sequence TTCN PAM
gaaauucuggagaauuucua

SEQ ID NO: 33355 - RNA, 20 nt, Artificial Sequence
  HTT spacer sequence TTCN PAM
gggcaucgcuauggaacuuu

SEQ ID NO: 33356 - RNA, 20 nt, Artificial Sequence
  HTT spacer sequence TTCN PAM
auagcgaugcccagaaguuu

SEQ ID NO: 33357 - RNA, 20 nt, Artificial Sequence
  HTT spacer sequence TTCN PAM
gcugugcagugaugacgcag

SEQ ID NO: 33358 - RNA, 20 nt, Artificial Sequence
  HTT spacer sequence TTCN PAM
ucagccaccauccugacauc

SEQ ID NO: 33359 - RNA, 20 nt, Artificial Sequence
  HTT spacer sequence TTCN PAM
uacuuugauaacuuuguuga

SEQ ID NO: 33360 - RNA, 20 nt, Artificial Sequence
  HTT spacer sequence TTCN PAM
ccucagagcuaucauuguug

SEQ ID NO: 33361 - RNA, 20 nt, Artificial Sequence
  HTT spacer sequence TTCN PAM
cucagccuacaacaaugaua

SEQ ID NO: 33362 - RNA, 20 nt, Artificial Sequence
  HTT spacer sequence TTCN PAM
ucucucagccuacaacaaug

SEQ ID NO: 33363 - RNA, 20 nt, Artificial Sequence
  HTT spacer sequence TTCN PAM
ucuguuuugagucccugagg

SEQ ID NO: 33364 - RNA, 20 nt, Artificial Sequence
  HTT spacer sequence TTCN PAM
guuuugagucccugaggaug

SEQ ID NO: 33365 - RNA, 20 nt, Artificial Sequence
  HTT spacer sequence TTCN PAM
uuucugauguaugguuugga

SEQ ID NO: 33366 - RNA, 20 nt, Artificial Sequence
  HTT spacer sequence TTCN PAM
gauguaugguuuggaggugc

SEQ ID NO: 33367 - RNA, 20 nt, Artificial Sequence
  HTT spacer sequence TTCN PAM
aaaccauacaauagagcacc

SEQ ID NO: 33368 - RNA, 20 nt, Artificial Sequence
  HTT spacer sequence TTCN PAM
aaaccauacaauagagcacc

SEQ ID NO: 33369 - RNA, 20 nt, Artificial Sequence
  HTT spacer sequence TTCN PAM
gaccgggcagguguggcaag

SEQ ID NO: 33370 - RNA, 20 nt, Artificial Sequence
  HTT spacer sequence TTCN PAM
uugaccuaggcaccgugcag

SEQ ID NO: 33371 - RNA, 20 nt, Artificial Sequence
  HTT spacer sequence TTCN PAM
cuucauugaccuaggcaccg

SEQ ID NO: 33372 - RNA, 20 nt, Artificial Sequence
  HTT spacer sequence TTCN PAM
caggagcauccaguggcuac

SEQ ID NO: 33373 - RNA, 20 nt, Artificial Sequence
  HTT spacer sequence TTCN PAM
cuggugccuguagugacauu

SEQ ID NO: 33374 - RNA, 20 nt, Artificial Sequence
  HTT spacer sequence TTCN PAM
augagucucaguuuucuuaa

SEQ ID NO: 33375 - RNA, 20 nt, Artificial Sequence
  HTT spacer sequence TTCN PAM
uaaccauaaaaugggaucaa

SEQ ID NO: 33376 - RNA, 20 nt, Artificial Sequence
  HTT spacer sequence TTCN PAM
uaccacuuugaggauccagu

SEQ ID NO: 33377 - RNA, 20 nt, Artificial Sequence
  HTT spacer sequence TTCN PAM
uauuaauaaugacauccuua

SEQ ID NO: 33378 - RNA, 20 nt, Artificial Sequence
  HTT spacer sequence TTCN PAM
cuuuuuccaucacaugguuu

SEQ ID NO: 33379 - RNA, 20 nt, Artificial Sequence
  HTT spacer sequence TTCN PAM
aucacaugguuuccauggua

SEQ ID NO: 33380 - RNA, 20 nt, Artificial Sequence
  HTT spacer sequence TTCN PAM
augguauccuuuugcccagg

SEQ ID NO: 33381 - RNA, 20 nt, Artificial Sequence
  HTT spacer sequence TTCN PAM
cugggcaaaaggauaccaug

SEQ ID NO: 33382 - RNA, 20 nt, Artificial Sequence
  HTT spacer sequence TTCN PAM
guggucaggacgcuggcuuc

SEQ ID NO: 33383 - RNA, 20 nt, Artificial Sequence
  HTT spacer sequence TTCN PAM
cuggagccaugggauucuag

SEQ ID NO: 33384 - RNA, 20 nt, Artificial Sequence
  HTT spacer sequence TTCN PAM
agcucccugucuugucccua

SEQ ID NO: 33385 - RNA, 20 nt, Artificial Sequence
  HTT spacer sequence TTCN PAM
cucuccgcuugcaauuccug

SEQ ID NO: 33386 - RNA, 20 nt, Artificial Sequence
  HTT spacer sequence TTCN PAM
ugcuuugcucgcaucucacu

SEQ ID NO: 33387 - RNA, 20 nt, Artificial Sequence
  HTT spacer sequence TTCN PAM
ccuuguucuccgugccugcu

SEQ ID NO: 33388 - RNA, 20 nt, Artificial Sequence
  HTT spacer sequence TTCN PAM
ccgugccugcugaucauugg

SEQ ID NO: 33389 - RNA, 20 nt, Artificial Sequence
  HTT spacer sequence TTCN PAM
aguuaagcuugcuucuccac

SEQ ID NO: 33390 - RNA, 20 nt, Artificial Sequence
  HTT spacer sequence TTCN PAM
ccacaggccuaaauauccuu

SEQ ID NO: 33391 - RNA, 20 nt, Artificial Sequence
  HTT spacer sequence TTCN PAM
uuuauucucacuggcaggac

SEQ ID NO: 33392 - RNA, 20 nt, Artificial Sequence
  HTT spacer sequence TTCN PAM
cacuggcaggaccagggcgg

SEQ ID NO: 33393 - RNA, 20 nt, Artificial Sequence
  HTT spacer sequence TTCN PAM
agaccagccugggcaaccug

SEQ ID NO: 33394 - RNA, 20 nt, Artificial Sequence
  HTT spacer sequence TTCN PAM
caaagugcugggaucacagg

SEQ ID NO: 33395 - RNA, 20 nt, Artificial Sequence
  HTT spacer sequence TTCN PAM
guucuugauauuugauccuc

SEQ ID NO: 33396 - RNA, 20 nt, Artificial Sequence
  HTT spacer sequence TTCN PAM
ugauauuugauccucagagu

SEQ ID NO: 33397 - RNA, 20 nt, Artificial Sequence
  HTT spacer sequence TTCN PAM
gacucugaggaucaaauauc

SEQ ID NO: 33398 - RNA, 20 nt, Artificial Sequence
  HTT spacer sequence TTCN PAM
uggcaaaugggacguuaaga

SEQ ID NO: 33399 - RNA, 20 nt, Artificial Sequence
  HTT spacer sequence TTCN PAM
cucugcccucuuaacguccc

SEQ ID NO: 33400 - RNA, 20 nt, Artificial Sequence
  HTT spacer sequence TTCN PAM
uauucucucugcccucuuaa

SEQ ID NO: 33401 - RNA, 20 nt, Artificial Sequence
  HTT spacer sequence TTCN PAM
guucauauucucucugcccu

SEQ ID NO: 33402 - RNA, 20 nt, Artificial Sequence
  HTT spacer sequence TTCN PAM
aauauuggucauuuaaugug

SEQ ID NO: 33403 - RNA, 20 nt, Artificial Sequence
  HTT spacer sequence TTCN PAM
uuuuuaaaccuccuucauuu

SEQ ID NO: 33404 - RNA, 20 nt, Artificial Sequence
  HTT spacer sequence TTCN PAM
uuuuuuuuccaggaauugcu

SEQ ID NO: 33405 - RNA, 20 nt, Artificial Sequence
  HTT spacer sequence TTCN PAM
aggaauugcuggacacagug

SEQ ID NO: 33406 - RNA, 20 nt, Artificial Sequence
  HTT spacer sequence TTCN PAM
uggaaaaaaaaugaaggagg

SEQ ID NO: 33407 - RNA, 20 nt, Artificial Sequence
  HTT spacer sequence TTCN PAM
uggcugucuccuugcuucuu

SEQ ID NO: 33408 - RNA, 20 nt, Artificial Sequence
  HTT spacer sequence TTCN PAM
uucccauguccucuucuuug

SEQ ID NO: 33409 - RNA, 20 nt, Artificial Sequence
  HTT spacer sequence TTCN PAM
cauguccucuucuuuguuuc

SEQ ID NO: 33410 - RNA, 20 nt, Artificial Sequence
  HTT spacer sequence TTCN PAM
uuguuuccagccauuucucc

SEQ ID NO: 33411 - RNA, 20 nt, Artificial Sequence
  HTT spacer sequence TTCN PAM
agccauuucucccuuaugcu

SEQ ID NO: 33412 - RNA, 20 nt, Artificial Sequence
  HTT spacer sequence TTCN PAM
cccuuaugcuuaaguuuggu

SEQ ID NO: 33413 - RNA, 20 nt, Artificial Sequence
  HTT spacer sequence TTCN PAM
ugcuuccucagaugcuguag

SEQ ID NO: 33414 - RNA, 20 nt, Artificial Sequence
  HTT spacer sequence TTCN PAM
ucagaugcuguaguugucag

SEQ ID NO: 33415 - RNA, 20 nt, Artificial Sequence
  HTT spacer sequence TTCN PAM
gguccuagacuuugucuucu

SEQ ID NO: 33416 - RNA, 20 nt, Artificial Sequence
  HTT spacer sequence TTCN PAM
caugaguauggcugugugug

SEQ ID NO: 33417 - RNA, 20 nt, Artificial Sequence
  HTT spacer sequence TTCN PAM
ccauacacacacagccauac

SEQ ID NO: 33418 - RNA, 20 nt, Artificial Sequence
  HTT spacer sequence TTCN PAM
acuuagcccaagaaaauggg

SEQ ID NO: 33419 - RNA, 20 nt, Artificial Sequence
  HTT spacer sequence TTCN PAM
ugggcuaaguagaaccuagu

SEQ ID NO: 33420 - RNA, 20 nt, Artificial Sequence
  HTT spacer sequence TTCN PAM
guagagaaaugcacugggua

SEQ ID NO: 33421 - RNA, 20 nt, Artificial Sequence
  HTT spacer sequence TTCN PAM
cuacagaaaccacaugcaaa

SEQ ID NO: 33422 - RNA, 20 nt, Artificial Sequence
  HTT spacer sequence TTCN PAM
ccgccugagacuaaccuacc

SEQ ID NO: 33423 - RNA, 20 nt, Artificial Sequence
  HTT spacer sequence TTCN PAM
ugcuggacacacgugcuuca

SEQ ID NO: 33424 - RNA, 20 nt, Artificial Sequence
  HTT spacer sequence TTCN PAM
uauguggcauaaagucuccg

SEQ ID NO: 33425 - RNA, 20 nt, Artificial Sequence
  HTT spacer sequence TTCN PAM
gugaggugcuggcaaaucac

SEQ ID NO: 33426 - RNA, 20 nt, Artificial Sequence
  HTT spacer sequence TTCN PAM
gccucuugacggugguggug

SEQ ID NO: 33427 - RNA, 20 nt, Artificial Sequence
  HTT spacer sequence TTCN PAM
ugccucccuagacaaaaauc

SEQ ID NO: 33428 - RNA, 20 nt, Artificial Sequence
  HTT spacer sequence TTCN PAM
uggagucagcagccaguagg

SEQ ID NO: 33429 - RNA, 20 nt, Artificial Sequence
  HTT spacer sequence TTCN PAM
ccuacuggcugcugacucca

SEQ ID NO: 33430 - RNA, 20 nt, Artificial Sequence
  HTT spacer sequence TTCN PAM
uaaucaucaccgccucuugu

SEQ ID NO: 33431 - RNA, 20 nt, Artificial Sequence
  HTT spacer sequence TTCN PAM
uggcaccccuugagacaaga

SEQ ID NO: 33432 - RNA, 20 nt, Artificial Sequence
  HTT spacer sequence TTCN PAM
gccuccacagcuuccuggca

SEQ ID NO: 33433 - RNA, 20 nt, Artificial Sequence
  HTT spacer sequence TTCN PAM
cuaccaaacaagguacaacc

SEQ ID NO: 33434 - RNA, 20 nt, Artificial Sequence
  HTT spacer sequence TTCN PAM
agagccccuaauucucuacc

SEQ ID NO: 33435 - RNA, 20 nt, Artificial Sequence
  HTT spacer sequence TTCN PAM
uaaaugauacacuccccuga

SEQ ID NO: 33436 - RNA, 20 nt, Artificial Sequence
  HTT spacer sequence TTCN PAM
gcagacacacagguggcugc

SEQ ID NO: 33437 - RNA, 20 nt, Artificial Sequence
  HTT spacer sequence TTCN PAM
cucuugccccugcuuccgca

SEQ ID NO: 33438 - RNA, 20 nt, Artificial Sequence
  HTT spacer sequence TTCN PAM
cugcucuuaggaggggcuga

SEQ ID NO: 33439 - RNA, 20 nt, Artificial Sequence
  HTT spacer sequence TTCN PAM
cuuguuauacaauaagcuug

SEQ ID NO: 33440 - RNA, 20 nt, Artificial Sequence
  HTT spacer sequence TTCN PAM
aguuuuauuuaagaaguaau

SEQ ID NO: 33441 - RNA, 20 nt, Artificial Sequence
  HTT spacer sequence TTCN PAM
uaaauaaaacuagaagccuu

SEQ ID NO: 33442 - RNA, 20 nt, Artificial Sequence
  HTT spacer sequence TTCN PAM
acauuacuucuuaaauaaaa

SEQ ID NO: 33443 - RNA, 20 nt, Artificial Sequence
  HTT spacer sequence TTCN PAM
cuuugcucauuuaaggacuu

SEQ ID NO: 33444 - RNA, 20 nt, Artificial Sequence
  HTT spacer sequence TTCN PAM
guacaaacugcaacaacagg

SEQ ID NO: 33445 - RNA, 20 nt, Artificial Sequence
  HTT spacer sequence TTCN PAM
gagauguuuuuacuccucag

SEQ ID NO: 33446 - RNA, 20 nt, Artificial Sequence
  HTT spacer sequence TTCN PAM
gaggaguaaaaacaucucag

SEQ ID NO: 33447 - RNA, 20 nt, Artificial Sequence
  HTT spacer sequence TTCN PAM
cagaaugugaucugguuuug

SEQ ID NO: 33448 - RNA, 20 nt, Artificial Sequence
  HTT spacer sequence TTCN PAM
gggaaauucugaggaguaaa

SEQ ID NO: 33449 - RNA, 20 nt, Artificial Sequence
  HTT spacer sequence TTCN PAM
agcuugcugacccaauaggu

SEQ ID NO: 33450 - RNA, 20 nt, Artificial Sequence
  HTT spacer sequence TTCN PAM
uaaaacuuguggguuaaccu

SEQ ID NO: 33451 - RNA, 20 nt, Artificial Sequence
  HTT spacer sequence TTCN PAM
ucccucuugggugggcaagc

SEQ ID NO: 33452 - RNA, 20 nt, Artificial Sequence
  HTT spacer sequence TTCN PAM
aaaugcuugcccacccaaga

SEQ ID NO: 33453 - RNA, 20 nt, Artificial Sequence
  HTT spacer sequence TTCN PAM
cuuccaaaugcuugcccacc

SEQ ID NO: 33454 - RNA, 20 nt, Artificial Sequence
  HTT spacer sequence TTCN PAM
cugucccauccccuagcuug

SEQ ID NO: 33455 - RNA, 20 nt, Artificial Sequence
  HTT spacer sequence TTCN PAM
caagcuaggggaugggacag

SEQ ID NO: 33456 - RNA, 20 nt, Artificial Sequence
  HTT spacer sequence TTCN PAM
cuaauguggacuuugugccg

SEQ ID NO: 33457 - RNA, 20 nt, Artificial Sequence
  HTT spacer sequence TTCN PAM
agcuaguaacgaugcuaacg

SEQ ID NO: 33458 - RNA, 20 nt, Artificial Sequence
  HTT spacer sequence TTCN PAM
gguuuagccucacaagugag

SEQ ID NO: 33459 - RNA, 20 nt, Artificial Sequence
  HTT spacer sequence TTCN PAM
ucacagcacaucucucaacc

SEQ ID NO: 33460 - RNA, 20 nt, Artificial Sequence
  HTT spacer sequence TTCN PAM
gcagguguggccccuccuca

SEQ ID NO: 33461 - RNA, 20 nt, Artificial Sequence
  HTT spacer sequence TTCN PAM
caaggcggaguccugcaucc

SEQ ID NO: 33462 - RNA, 20 nt, Artificial Sequence
  HTT spacer sequence TTCN PAM
aggccagagcgagggucugu

SEQ ID NO: 33463 - RNA, 20 nt, Artificial Sequence
  HTT spacer sequence TTCN PAM
guuggaugauacgggcucag

SEQ ID NO: 33464 - RNA, 20 nt, Artificial Sequence
  HTT spacer sequence TTCN PAM
gcuagugaagauuaaagauu

SEQ ID NO: 33465 - RNA, 20 nt, Artificial Sequence
  HTT spacer sequence TTCN PAM
cuagcagaacauucuguugg

SEQ ID NO: 33466 - RNA, 20 nt, Artificial Sequence
  HTT spacer sequence TTCN PAM
cucuuguugcccaggcugga

SEQ ID NO: 33467 - RNA, 20 nt, Artificial Sequence
  HTT spacer sequence TTCN PAM
aacuauucuccugccucagc

SEQ ID NO: 33468 - RNA, 20 nt, Artificial Sequence
  HTT spacer sequence TTCN PAM
ccugccucagccucucgagu

SEQ ID NO: 33469 - RNA, 20 nt, Artificial Sequence
  HTT spacer sequence TTCN PAM
ccauguuggucaggcugguc

SEQ ID NO: 33470 - RNA, 20 nt, Artificial Sequence
  HTT spacer sequence TTCN PAM
agaccagccugaccaacaug

SEQ ID NO: 33471 - RNA, 20 nt, Artificial Sequence
  HTT spacer sequence TTCN PAM
aauacaauaaauccuggcca

SEQ ID NO: 33472 - RNA, 20 nt, Artificial Sequence
  HTT spacer sequence TTCN PAM
uuaucaucaaauacuacaua

SEQ ID NO: 33473 - RNA, 20 nt, Artificial Sequence
  HTT spacer sequence TTCN PAM
uuccauuuuucuguuuaagu

SEQ ID NO: 33474 - RNA, 20 nt, Artificial Sequence
  HTT spacer sequence TTCN PAM
auuuuucuguuuaagugaau

SEQ ID NO: 33475 - RNA, 20 nt, Artificial Sequence
  HTT spacer sequence TTCN PAM
guuuaagugaaugaccugua

SEQ ID NO: 33476 - RNA, 20 nt, Artificial Sequence
  HTT spacer sequence TTCN PAM
cuuaaacagaaaaauggaaa

SEQ ID NO: 33477 - RNA, 20 nt, Artificial Sequence
  HTT spacer sequence TTCN PAM
guaacuuccugcauauauuu

SEQ ID NO: 33478 - RNA, 20 nt, Artificial Sequence
  HTT spacer sequence TTCN PAM
ugcauauauuuguuucuuuc

SEQ ID NO: 33479 - RNA, 20 nt, Artificial Sequence
  HTT spacer sequence TTCN PAM
uucauucuuaaugaauauau

SEQ ID NO: 33480 - RNA, 20 nt, Artificial Sequence
  HTT spacer sequence TTCN PAM
uucuuaaugaauauauucuu

SEQ ID NO: 33481 - RNA, 20 nt, Artificial Sequence
  HTT spacer sequence TTCN PAM
uaaugaauauauucuuaauu

SEQ ID NO: 33482 - RNA, 20 nt, Artificial Sequence
  HTT spacer sequence TTCN PAM
uuaagaaugaaagaaacaaa

SEQ ID NO: 33483 - RNA, 20 nt, Artificial Sequence
  HTT spacer sequence TTCN PAM
uaauuuaguugcuauuaugu

SEQ ID NO: 33484 - RNA, 20 nt, Artificial Sequence
  HTT spacer sequence TTCN PAM
auuuuggggcaaagcaaaac

SEQ ID NO: 33485 - RNA, 20 nt, Artificial Sequence
  HTT spacer sequence TTCN PAM
uuuuagcucguuuuagaacu

SEQ ID NO: 33486 - RNA, 20 nt, Artificial Sequence
  HTT spacer sequence TTCN PAM
aaaacgagcuaaaaggaaac

SEQ ID NO: 33487 - RNA, 20 nt, Artificial Sequence
  HTT spacer sequence TTCN PAM
auaaaucucuugugauuugu

SEQ ID NO: 33488 - RNA, 20 nt, Artificial Sequence
  HTT spacer sequence TTCN PAM
aaucuuccaagguuacagcu

SEQ ID NO: 33489 - RNA, 20 nt, Artificial Sequence
  HTT spacer sequence TTCN PAM
aagguuacagcucgagcucu

SEQ ID NO: 33490 - RNA, 20 nt, Artificial Sequence
  HTT spacer sequence TTCN PAM
uuauagagcucgagcuguaa

SEQ ID NO: 33491 - RNA, 20 nt, Artificial Sequence
  HTT spacer sequence TTCN PAM
uuuuuaaaaauguuuuaaau

SEQ ID NO: 33492 - RNA, 20 nt, Artificial Sequence
  HTT spacer sequence TTCN PAM
auggugugauuauuauguau

SEQ ID NO: 33493 - RNA, 20 nt, Artificial Sequence
  HTT spacer sequence TTCN PAM
cccaugcuagaguacagugg

SEQ ID NO: 33494 - RNA, 20 nt, Artificial Sequence
  HTT spacer sequence TTCN PAM
accgaacuuugggcuggucu

SEQ ID NO: 33495 - RNA, 20 nt, Artificial Sequence
  HTT spacer sequence TTCN PAM
guugaacccgggaggcggag

SEQ ID NO: 33496 - RNA, 20 nt, Artificial Sequence
  HTT spacer sequence TTCN PAM
agaccagccuggccaacaug

SEQ ID NO: 33497 - RNA, 20 nt, Artificial Sequence
  HTT spacer sequence TTCN PAM
ccauguuggccaggcugguc

SEQ ID NO: 33498 - RNA, 20 nt, Artificial Sequence
  HTT spacer sequence TTCN PAM
ccuaccucagccucccgagu

SEQ ID NO: 33499 - RNA, 20 nt, Artificial Sequence
  HTT spacer sequence TTCN PAM
agcgauuccccuaccucagc

SEQ ID NO: 33500 - RNA, 20 nt, Artificial Sequence
  HTT spacer sequence TTCN PAM
agccugagcgacagagugag

SEQ ID NO: 33501 - RNA, 20 nt, Artificial Sequence
  HTT spacer sequence TTCN PAM
uuuuuauuuuuugagacaaa

SEQ ID NO: 33502 - RNA, 20 nt, Artificial Sequence
  HTT spacer sequence TTCN PAM
caaagugcugggacuaaggu

SEQ ID NO: 33503 - RNA, 20 nt, Artificial Sequence
  HTT spacer sequence TTCN PAM
guacagacagcguuuugcca

SEQ ID NO: 33504 - RNA, 20 nt, Artificial Sequence
  HTT spacer sequence TTCN PAM
aggcucaauuaauccuccca

SEQ ID NO: 33505 - RNA, 20 nt, Artificial Sequence
  HTT spacer sequence TTCN PAM
accuuccaggcucaauuaau

SEQ ID NO: 33506 - RNA, 20 nt, Artificial Sequence
  HTT spacer sequence TTCN PAM
gccugggcgaccaagugaga

SEQ ID NO: 33507 - RNA, 20 nt, Artificial Sequence
  HTT spacer sequence TTCN PAM
uuugagacagggucucacuu

SEQ ID NO: 33508 - RNA, 20 nt, Artificial Sequence
  HTT spacer sequence TTCN PAM
acagcacagcagagggauca

SEQ ID NO: 33509 - RNA, 20 nt, Artificial Sequence
  HTT spacer sequence TTCN PAM
aucacugagcaaacuucacu

SEQ ID NO: 33510 - RNA, 20 nt, Artificial Sequence
  HTT spacer sequence TTCN PAM
cucuguuaagcagcaggugu

SEQ ID NO: 33511 - RNA, 20 nt, Artificial Sequence
  HTT spacer sequence TTCN PAM
ucguuauucaguaauucaca

SEQ ID NO: 33512 - RNA, 20 nt, Artificial Sequence
  HTT spacer sequence TTCN PAM
guaauucacaauguuagaag

SEQ ID NO: 33513 - RNA, 20 nt, Artificial Sequence
  HTT spacer sequence TTCN PAM
caauguuagaaggaaaugcu

SEQ ID NO: 33514 - RNA, 20 nt, Artificial Sequence
  HTT spacer sequence TTCN PAM
aacauugugaauuacugaau

SEQ ID NO: 33515 - RNA, 20 nt, Artificial Sequence
  HTT spacer sequence TTCN PAM
uucuaacauugugaauuacu

SEQ ID NO: 33516 - RNA, 20 nt, Artificial Sequence
  HTT spacer sequence TTCN PAM
ucaaaagguuacucuuuauu

SEQ ID NO: 33517 - RNA, 20 nt, Artificial Sequence
  HTT spacer sequence TTCN PAM
aaagguuacucuuuauuaga

SEQ ID NO: 33518 - RNA, 20 nt, Artificial Sequence
  HTT spacer sequence TTCN PAM
caucucaucuaauaaagagu

SEQ ID NO: 33519 - RNA, 20 nt, Artificial Sequence
  HTT spacer sequence TTCN PAM
auuauaaagauauaaaguaa

SEQ ID NO: 33520 - RNA, 20 nt, Artificial Sequence
  HTT spacer sequence TTCN PAM
cuaaaauuagaaaguaacaa

SEQ ID NO: 33521 - RNA, 20 nt, Artificial Sequence
  HTT spacer sequence TTCN PAM
aauuuuagagaaaaggccau

SEQ ID NO: 33522 - RNA, 20 nt, Artificial Sequence
  HTT spacer sequence TTCN PAM
uuguuacuuucuaauuuuag

SEQ ID NO: 33523 - RNA, 20 nt, Artificial Sequence
  HTT spacer sequence TTCN PAM
uuccuuguuacuuucuaauu

SEQ ID NO: 33524 - RNA, 20 nt, Artificial Sequence
  HTT spacer sequence TTCN PAM
uuucuaugcaacccucuugg

SEQ ID NO: 33525 - RNA, 20 nt, Artificial Sequence
  HTT spacer sequence TTCN PAM
augcaacccucuuggugacu

SEQ ID NO: 33526 - RNA, 20 nt, Artificial Sequence
  HTT spacer sequence TTCN PAM
gagggggugcaaugaggguu

SEQ ID NO: 33527 - RNA, 20 nt, Artificial Sequence
  HTT spacer sequence TTCN PAM
gccucagaaaugcagguaag

SEQ ID NO: 33528 - RNA, 20 nt, Artificial Sequence
  HTT spacer sequence TTCN PAM
gaggccgaaccaggugagcc

SEQ ID NO: 33529 - RNA, 20 nt, Artificial Sequence
  HTT spacer sequence TTCN PAM
aaagucugcucugcccucuc

SEQ ID NO: 33530 - RNA, 20 nt, Artificial Sequence
  HTT spacer sequence TTCN PAM
cucauagcacuaauccaugu

SEQ ID NO: 33531 - RNA, 20 nt, Artificial Sequence
  HTT spacer sequence TTCN PAM
gacauggauuagugcuauga

SEQ ID NO: 33532 - RNA, 20 nt, Artificial Sequence
  HTT spacer sequence TTCN PAM
aucccacccuuccgcaagag

SEQ ID NO: 33533 - RNA, 20 nt, Artificial Sequence
  HTT spacer sequence TTCN PAM
gcaagagacuuaugggaugu

SEQ ID NO: 33534 - RNA, 20 nt, Artificial Sequence
  HTT spacer sequence TTCN PAM
acaauuuggcaaguaucuuu

SEQ ID NO: 33535 - RNA, 20 nt, Artificial Sequence
  HTT spacer sequence TTCN PAM
uuauugcugacuauaggagu

SEQ ID NO: 33536 - RNA, 20 nt, Artificial Sequence
  HTT spacer sequence TTCN PAM
cagugcaacaaccauauuuu

SEQ ID NO: 33537 - RNA, 20 nt, Artificial Sequence
  HTT spacer sequence TTCN PAM
caauccguuaagauacaacu

SEQ ID NO: 33538 - RNA, 20 nt, Artificial Sequence
  HTT spacer sequence TTCN PAM
ucagcucccuccuucuccuu

SEQ ID NO: 33539 - RNA, 20 nt, Artificial Sequence
  HTT spacer sequence TTCN PAM
ccuuaaccagcaauacaugc

SEQ ID NO: 33540 - RNA, 20 nt, Artificial Sequence
  HTT spacer sequence TTCN PAM
cagugacucaggauggagcu

SEQ ID NO: 33541 - RNA, 20 nt, Artificial Sequence
  HTT spacer sequence TTCN PAM
uauuaauagugaggguuuag

SEQ ID NO: 33542 - RNA, 20 nt, Artificial Sequence
  HTT spacer sequence TTCN PAM
auaagaaucuuauauggguc

SEQ ID NO: 33543 - RNA, 20 nt, Artificial Sequence
  HTT spacer sequence TTCN PAM
uauugaaacucaguucauau

SEQ ID NO: 33544 - RNA, 20 nt, Artificial Sequence
  HTT spacer sequence TTCN PAM
ggaggccaaggcagguggau

SEQ ID NO: 33545 - RNA, 20 nt, Artificial Sequence
  HTT spacer sequence TTCN PAM
ccauguugccuagucugggu

SEQ ID NO: 33546 - RNA, 20 nt, Artificial Sequence
  HTT spacer sequence TTCN PAM
ggauuuugguuuuuuugaga

SEQ ID NO: 33547 - RNA, 20 nt, Artificial Sequence
  HTT spacer sequence TTCN PAM
uuucuggauuuugguuuuuu

SEQ ID NO: 33548 - RNA, 20 nt, Artificial Sequence
  HTT spacer sequence TTCN PAM
uuagugauuauaccucugca

SEQ ID NO: 33549 - RNA, 20 nt, Artificial Sequence
  HTT spacer sequence TTCN PAM
uuuuguauaaucuuuuuucu

SEQ ID NO: 33550 - RNA, 20 nt, Artificial Sequence
  HTT spacer sequence TTCN PAM
uuuacuaucauuuaaaaaaa

SEQ ID NO: 33551 - RNA, 20 nt, Artificial Sequence
  HTT spacer sequence TTCN PAM
gaagcaacacauccagguuc

SEQ ID NO: 33552 - RNA, 20 nt, Artificial Sequence
  HTT spacer sequence TTCN PAM
gaaauauaacacauuuuuuu

SEQ ID NO: 33553 - RNA, 20 nt, Artificial Sequence
  HTT spacer sequence TTCN PAM
gcacauagcagccaaaguga

SEQ ID NO: 33554 - RNA, 20 nt, Artificial Sequence
  HTT spacer sequence TTCN PAM
uuaaggucacuuuggcugcu

SEQ ID NO: 33555 - RNA, 20 nt, Artificial Sequence
  HTT spacer sequence TTCN PAM
cuuauuuaaacucuuguacc

SEQ ID NO: 33556 - RNA, 20 nt, Artificial Sequence
  HTT spacer sequence TTCN PAM
cagugccguuuagauagaga

SEQ ID NO: 33557 - RNA, 20 nt, Artificial Sequence
  HTT spacer sequence TTCN PAM
agacucgucaauggcucugu

SEQ ID NO: 33558 - RNA, 20 nt, Artificial Sequence
  HTT spacer sequence TTCN PAM
uccuccugaugguuuuuuuu

SEQ ID NO: 33559 - RNA, 20 nt, Artificial Sequence
  HTT spacer sequence TTCN PAM
uccugaugguuuuuuuuucc

SEQ ID NO: 33560 - RNA, 20 nt, Artificial Sequence
  HTT spacer sequence TTCN PAM
cccuuaguucucagcggaac

SEQ ID NO: 33561 - RNA, 20 nt, Artificial Sequence
  HTT spacer sequence TTCN PAM
cagcggaacagucacuuccu

SEQ ID NO: 33562 - RNA, 20 nt, Artificial Sequence
  HTT spacer sequence TTCN PAM
gcugagaacuaagggggaaa

SEQ ID NO: 33563 - RNA, 20 nt, Artificial Sequence
  HTT spacer sequence TTCN PAM
uuagggagguuuccccagcc

SEQ ID NO: 33564 - RNA, 20 nt, Artificial Sequence
  HTT spacer sequence TTCN PAM
ccagccacccucugaggccg

SEQ ID NO: 33565 - RNA, 20 nt, Artificial Sequence
  HTT spacer sequence TTCN PAM
cccaacacacagagugacag

SEQ ID NO: 33566 - RNA, 20 nt, Artificial Sequence
  HTT spacer sequence TTCN PAM
ugugaucugugacucacugc

SEQ ID NO: 33567 - RNA, 20 nt, Artificial Sequence
  HTT spacer sequence TTCN PAM
gcuuuucuucucuccccaca

SEQ ID NO: 33568 - RNA, 20 nt, Artificial Sequence
  HTT spacer sequence TTCN PAM
ucucuccccacaaccccauu

SEQ ID NO: 33569 - RNA, 20 nt, Artificial Sequence
  HTT spacer sequence TTCN PAM
cuccccacaaccccauuuua

SEQ ID NO: 33570 - RNA, 20 nt, Artificial Sequence
  HTT spacer sequence TTCN PAM
ccuuuuucaggaaagcuuua

SEQ ID NO: 33571 - RNA, 20 nt, Artificial Sequence
  HTT spacer sequence TTCN PAM
ggaaagcuuuauucccauuu

SEQ ID NO: 33572 - RNA, 20 nt, Artificial Sequence
  HTT spacer sequence TTCN PAM
ugaaaaaggagaauuauaaa

SEQ ID NO: 33573 - RNA, 20 nt, Artificial Sequence
  HTT spacer sequence TTCN PAM
cauuuaaaaauuuuuguuuu

SEQ ID NO: 33574 - RNA, 20 nt, Artificial Sequence
  HTT spacer sequence TTCN PAM
uacacuuauuuucuaauuaa

SEQ ID NO: 33575 - RNA, 20 nt, Artificial Sequence
  HTT spacer sequence TTCN PAM
aauuaaaaaugaguguuuua

SEQ ID NO: 33576 - RNA, 20 nt, Artificial Sequence
  HTT spacer sequence TTCN PAM
uaaaacacucauuuuuaauu

SEQ ID NO: 33577 - RNA, 20 nt, Artificial Sequence
  HTT spacer sequence TTCN PAM
cuuaugaucacagaggaucu

SEQ ID NO: 33578 - RNA, 20 nt, Artificial Sequence
  HTT spacer sequence TTCN PAM
uuucucuuaugaucacagag

SEQ ID NO: 33579 - RNA, 20 nt, Artificial Sequence
  HTT spacer sequence TTCN PAM
uccacauuucauccuccugu

SEQ ID NO: 33580 - RNA, 20 nt, Artificial Sequence
  HTT spacer sequence TTCN PAM
uccuccuguucuuucagcug

SEQ ID NO: 33581 - RNA, 20 nt, Artificial Sequence
  HTT spacer sequence TTCN PAM
uucagcugaguuuuccccau

SEQ ID NO: 33582 - RNA, 20 nt, Artificial Sequence
  HTT spacer sequence TTCN PAM
gcugaguuuuccccauccca

SEQ ID NO: 33583 - RNA, 20 nt, Artificial Sequence
  HTT spacer sequence TTCN PAM
ccaucccauuagggacuguu

SEQ ID NO: 33584 - RNA, 20 nt, Artificial Sequence
  HTT spacer sequence TTCN PAM
aacagucccuaaugggaugg

SEQ ID NO: 33585 - RNA, 20 nt, Artificial Sequence
  HTT spacer sequence TTCN PAM
cuaacagggaaugaauugcu

SEQ ID NO: 33586 - RNA, 20 nt, Artificial Sequence
  HTT spacer sequence TTCN PAM
cuguuagggaaaagccaguu

SEQ ID NO: 33587 - RNA, 20 nt, Artificial Sequence
  HTT spacer sequence TTCN PAM
uucccuguuagggaaaagcc

SEQ ID NO: 33588 - RNA, 20 nt, Artificial Sequence
  HTT spacer sequence TTCN PAM
guuucuccugaaggagagcu

SEQ ID NO: 33589 - RNA, 20 nt, Artificial Sequence
  HTT spacer sequence TTCN PAM
ccugaaggagagcuggaaga

SEQ ID NO: 33590 - RNA, 20 nt, Artificial Sequence
  HTT spacer sequence TTCN PAM
ggagaaacagaagcaauuca

SEQ ID NO: 33591 - RNA, 20 nt, Artificial Sequence
  HTT spacer sequence TTCN PAM
agcucuccuucaggagaaac

SEQ ID NO: 33592 - RNA, 20 nt, Artificial Sequence
  HTT spacer sequence TTCN PAM
uccagcucuccuucaggaga

SEQ ID NO: 33593 - RNA, 20 nt, Artificial Sequence
  HTT spacer sequence TTCN PAM
uuugcauacacaggccuuac

SEQ ID NO: 33594 - RNA, 20 nt, Artificial Sequence
  HTT spacer sequence TTCN PAM
ccagguaaggccuguguaug

SEQ ID NO: 33595 - RNA, 20 nt, Artificial Sequence
  HTT spacer sequence TTCN PAM
gccgugccugacucgaacaa

SEQ ID NO: 33596 - RNA, 20 nt, Artificial Sequence
  HTT spacer sequence TTCN PAM
agucaggcacggcagaaggu

SEQ ID NO: 33597 - RNA, 20 nt, Artificial Sequence
  HTT spacer sequence TTCN PAM
ggucucuugcuuguucgagu

SEQ ID NO: 33598 - RNA, 20 nt, Artificial Sequence
  HTT spacer sequence TTCN PAM
ucgggucucuugcuuguucg

SEQ ID NO: 33599 - RNA, 20 nt, Artificial Sequence
  HTT spacer sequence TTCN PAM
caaaauuauggcuucuuuug

SEQ ID NO: 33600 - RNA, 20 nt, Artificial Sequence
  HTT spacer sequence TTCN PAM
uuuggcaauuuugcaaauga

SEQ ID NO: 33601 - RNA, 20 nt, Artificial Sequence
  HTT spacer sequence TTCN PAM
uugucauuugcaaaauugcc

SEQ ID NO: 33602 - RNA, 20 nt, Artificial Sequence
  HTT spacer sequence TTCN PAM
gaacagggaguccuguggga

SEQ ID NO: 33603 - RNA, 20 nt, Artificial Sequence
  HTT spacer sequence TTCN PAM
gaagcccucacccuccacag

SEQ ID NO: 33604 - RNA, 20 nt, Artificial Sequence
  HTT spacer sequence TTCN PAM
ugggguauguuguaugucgu

SEQ ID NO: 33605 - RNA, 20 nt, Artificial Sequence
  HTT spacer sequence TTCN PAM
uuccacuucucauuucuuac

SEQ ID NO: 33606 - RNA, 20 nt, Artificial Sequence
  HTT spacer sequence TTCN PAM
acuucucauuucuuacugug

SEQ ID NO: 33607 - RNA, 20 nt, Artificial Sequence
  HTT spacer sequence TTCN PAM
cauuucuuacugugggguga

SEQ ID NO: 33608 - RNA, 20 nt, Artificial Sequence
  HTT spacer sequence TTCN PAM
uacuguggggugaagaguug

SEQ ID NO: 33609 - RNA, 20 nt, Artificial Sequence
  HTT spacer sequence TTCN PAM
ccccacaguaagaaaugaga

SEQ ID NO: 33610 - RNA, 20 nt, Artificial Sequence
  HTT spacer sequence TTCN PAM
acucuucaccccacaguaag

SEQ ID NO: 33611 - RNA, 20 nt, Artificial Sequence
  HTT spacer sequence TTCN PAM
agaugcaaauugaaaaggca

SEQ ID NO: 33612 - RNA, 20 nt, Artificial Sequence
  HTT spacer sequence TTCN PAM
auuugcaucuagaaaccauc

SEQ ID NO: 33613 - RNA, 20 nt, Artificial Sequence
  HTT spacer sequence TTCN PAM
agagcagauuuguuuucggc

SEQ ID NO: 33614 - RNA, 20 nt, Artificial Sequence
  HTT spacer sequence TTCN PAM
gcguacuagagugacucuuu

SEQ ID NO: 33615 - RNA, 20 nt, Artificial Sequence
  HTT spacer sequence TTCN PAM
cgcagcuagguuaaagaguc

SEQ ID NO: 33616 - RNA, 20 nt, Artificial Sequence
  HTT spacer sequence TTCN PAM
ccuaccugcagucuuggcac

SEQ ID NO: 33617 - RNA, 20 nt, Artificial Sequence
  HTT spacer sequence TTCN PAM
gacccacaaggccucgucag

SEQ ID NO: 33618 - RNA, 20 nt, Artificial Sequence
  HTT spacer sequence TTCN PAM
uguugugcauuccaacaaau

SEQ ID NO: 33619 - RNA, 20 nt, Artificial Sequence
  HTT spacer sequence TTCN PAM
aacaaaucaucuucaaaccc

SEQ ID NO: 33620 - RNA, 20 nt, Artificial Sequence
  HTT spacer sequence TTCN PAM
aacccacuuuaguguuuugu

SEQ ID NO: 33621 - RNA, 20 nt, Artificial Sequence
  HTT spacer sequence TTCN PAM
ggacauuauaaacaaaacac

SEQ ID NO: 33622 - RNA, 20 nt, Artificial Sequence
  HTT spacer sequence TTCN PAM
uagccucuuccuuuuuggua

SEQ ID NO: 33623 - RNA, 20 nt, Artificial Sequence
  HTT spacer sequence TTCN PAM
uuuuugguaggucaguccug

SEQ ID NO: 33624 - RNA, 20 nt, Artificial Sequence
  HTT spacer sequence TTCN PAM
acucuacccaguguguauca

SEQ ID NO: 33625 - RNA, 20 nt, Artificial Sequence
  HTT spacer sequence TTCN PAM
aauccaaguccaucugauuc

SEQ ID NO: 33626 - RNA, 20 nt, Artificial Sequence
  HTT spacer sequence TTCN PAM
guccucuuuacuaguuauuu

SEQ ID NO: 33627 - RNA, 20 nt, Artificial Sequence
  HTT spacer sequence TTCN PAM
ucuaggcaaacugcccaaca

SEQ ID NO: 33628 - RNA, 20 nt, Artificial Sequence
  HTT spacer sequence TTCN PAM
uucguauucugaaaaauaag

SEQ ID NO: 33629 - RNA, 20 nt, Artificial Sequence
  HTT spacer sequence TTCN PAM
uauucugaaaaauaagccuu

SEQ ID NO: 33630 - RNA, 20 nt, Artificial Sequence
  HTT spacer sequence TTCN PAM
gaaaaauaagccuuaauggg

SEQ ID NO: 33631 - RNA, 20 nt, Artificial Sequence
  HTT spacer sequence TTCN PAM
gaauacgaaggaaauagcuu

SEQ ID NO: 33632 - RNA, 20 nt, Artificial Sequence
  HTT spacer sequence TTCN PAM
uuuauuuuacucucagaguu

SEQ ID NO: 33633 - RNA, 20 nt, Artificial Sequence
  HTT spacer sequence TTCN PAM
cgugggugacuaugcuacac

SEQ ID NO: 33634 - RNA, 20 nt, Artificial Sequence
  HTT spacer sequence TTCN PAM
gcuaauaagagcaguagcag

SEQ ID NO: 33635 - RNA, 20 nt, Artificial Sequence
  HTT spacer sequence TTCN PAM
aaaucauucagcuaauaaga

SEQ ID NO: 33636 - RNA, 20 nt, Artificial Sequence
  HTT spacer sequence TTCN PAM
cuugagcuucgaaguuuucu

SEQ ID NO: 33637 - RNA, 20 nt, Artificial Sequence
  HTT spacer sequence TTCN PAM
aaguuuucuuguuaauacua

SEQ ID NO: 33638 - RNA, 20 nt, Artificial Sequence
  HTT spacer sequence TTCN PAM
aagcucaagagaaaaaacau

SEQ ID NO: 33639 - RNA, 20 nt, Artificial Sequence
  HTT spacer sequence TTCN PAM
uguuaauacuaaggagauau

SEQ ID NO: 33640 - RNA, 20 nt, Artificial Sequence
  HTT spacer sequence TTCN PAM
aacuagucaugggguuuugg

SEQ ID NO: 33641 - RNA, 20 nt, Artificial Sequence
  HTT spacer sequence TTCN PAM
aaaaccccaugacuaguuug

SEQ ID NO: 33642 - RNA, 20 nt, Artificial Sequence
  HTT spacer sequence TTCN PAM
ucauuccaaaaccccaugac

SEQ ID NO: 33643 - RNA, 20 nt, Artificial Sequence
  HTT spacer sequence TTCN PAM
ucaucucccuucgucauucc

SEQ ID NO: 33644 - RNA, 20 nt, Artificial Sequence
  HTT spacer sequence TTCN PAM
uuagauucaucaucucccuu

SEQ ID NO: 33645 - RNA, 20 nt, Artificial Sequence
  HTT spacer sequence TTCN PAM
ucaugcucaguaaaugguag

SEQ ID NO: 33646 - RNA, 20 nt, Artificial Sequence
  HTT spacer sequence TTCN PAM
ugcucaguaaaugguaguuu

SEQ ID NO: 33647 - RNA, 20 nt, Artificial Sequence
  HTT spacer sequence TTCN PAM
gcugcuguuauuuuuauuac

SEQ ID NO: 33648 - RNA, 20 nt, Artificial Sequence
  HTT spacer sequence TTCN PAM
aaagagaugguaauaaaaau

SEQ ID NO: 33649 - RNA, 20 nt, Artificial Sequence
  HTT spacer sequence TTCN PAM
acagaccccaguguacagau

SEQ ID NO: 33650 - RNA, 20 nt, Artificial Sequence
  HTT spacer sequence TTCN PAM
caucauuuucaugauuucga

SEQ ID NO: 33651 - RNA, 20 nt, Artificial Sequence
  HTT spacer sequence TTCN PAM
ugauuucgaucaccauuuga

SEQ ID NO: 33652 - RNA, 20 nt, Artificial Sequence
  HTT spacer sequence TTCN PAM
aucaccauuugaguaugaug

SEQ ID NO: 33653 - RNA, 20 nt, Artificial Sequence
  HTT spacer sequence TTCN PAM
acaaaguguuagcaucauca

SEQ ID NO: 33654 - RNA, 20 nt, Artificial Sequence
  HTT spacer sequence TTCN PAM
acguucaacaaaguguuagc

SEQ ID NO: 33655 - RNA, 20 nt, Artificial Sequence
  HTT spacer sequence TTCN PAM
uuccugaaccuuuggcauua

SEQ ID NO: 33656 - RNA, 20 nt, Artificial Sequence
  HTT spacer sequence TTCN PAM
ugaaccuuuggcauuaaaaa

SEQ ID NO: 33657 - RNA, 20 nt, Artificial Sequence
  HTT spacer sequence TTCN PAM
ggaaggaaguaauuaacgga

SEQ ID NO: 33658 - RNA, 20 nt, Artificial Sequence
  HTT spacer sequence TTCN PAM
gcuaccucucugcucauuua

SEQ ID NO: 33659 - RNA, 20 nt, Artificial Sequence
  HTT spacer sequence TTCN PAM
aauuuauuaucaagagccug

SEQ ID NO: 33660 - RNA, 20 nt, Artificial Sequence
  HTT spacer sequence TTCN PAM
guuuuuuuagagauaggguc

SEQ ID NO: 33661 - RNA, 20 nt, Artificial Sequence
  HTT spacer sequence TTCN PAM
aggcuacacugagcugugau

SEQ ID NO: 33662 - RNA, 20 nt, Artificial Sequence
  HTT spacer sequence TTCN PAM
uaaaaaaaaaaaauauauau

SEQ ID NO: 33663 - RNA, 20 nt, Artificial Sequence
  HTT spacer sequence TTCN PAM
uugauaauauauauauauau

SEQ ID NO: 33664 - RNA, 20 nt, Artificial Sequence
  HTT spacer sequence TTCN PAM
guaguaccaacaggauuaua

SEQ ID NO: 33665 - RNA, 20 nt, Artificial Sequence
  HTT spacer sequence TTCN PAM
cuuccuacuuuuucucuuaa

SEQ ID NO: 33666 - RNA, 20 nt, Artificial Sequence
  HTT spacer sequence TTCN PAM
uacuuuuucucuuaauccuu

SEQ ID NO: 33667 - RNA, 20 nt, Artificial Sequence
  HTT spacer sequence TTCN PAM
cuuaauccuugugucucaca

SEQ ID NO: 33668 - RNA, 20 nt, Artificial Sequence
  HTT spacer sequence TTCN PAM
uccaauauuuacuuucaugu

SEQ ID NO: 33669 - RNA, 20 nt, Artificial Sequence
  HTT spacer sequence TTCN PAM
aauauuuacuuucauguuuc

SEQ ID NO: 33670 - RNA, 20 nt, Artificial Sequence
  HTT spacer sequence TTCN PAM
uguuucuuucuuucuuucuu

SEQ ID NO: 33671 - RNA, 20 nt, Artificial Sequence
  HTT spacer sequence TTCN PAM
uucuuucuuucuuuuuuuuu

SEQ ID NO: 33672 - RNA, 20 nt, Artificial Sequence
  HTT spacer sequence TTCN PAM
uucuuucuuuuuuuuucuuu

SEQ ID NO: 33673 - RNA, 20 nt, Artificial Sequence
  HTT spacer sequence TTCN PAM
uucuuuuuuuuucuuugaga

SEQ ID NO: 33674 - RNA, 20 nt, Artificial Sequence
  HTT spacer sequence TTCN PAM
uuuuuuuucuuugagaugga

SEQ ID NO: 33675 - RNA, 20 nt, Artificial Sequence
  HTT spacer sequence TTCN PAM
uugagauggaguuuugcucu

SEQ ID NO: 33676 - RNA, 20 nt, Artificial Sequence
  HTT spacer sequence TTCN PAM
agcgauucuccugccucagc

SEQ ID NO: 33677 - RNA, 20 nt, Artificial Sequence
  HTT spacer sequence TTCN PAM
ccugccucagccuccuagua

SEQ ID NO: 33678 - RNA, 20 nt, Artificial Sequence
  HTT spacer sequence TTCN PAM
ccggguuggucaggcugguc

SEQ ID NO: 33679 - RNA, 20 nt, Artificial Sequence
  HTT spacer sequence TTCN PAM
agaccagccugaccaacccg

SEQ ID NO: 33680 - RNA, 20 nt, Artificial Sequence
  HTT spacer sequence TTCN PAM
acauuucuaaauaacaugcu

SEQ ID NO: 33681 - RNA, 20 nt, Artificial Sequence
  HTT spacer sequence TTCN PAM
aaauaacaugcuucuacugc

SEQ ID NO: 33682 - RNA, 20 nt, Artificial Sequence
  HTT spacer sequence TTCN PAM
acugcuauuuuuuuuuucaa

SEQ ID NO: 33683 - RNA, 20 nt, Artificial Sequence
  HTT spacer sequence TTCN PAM
auuuuagacauuuuuuuacu

SEQ ID NO: 33684 - RNA, 20 nt, Artificial Sequence
  HTT spacer sequence TTCN PAM
cuauaguucuaucagaauuc

SEQ ID NO: 33685 - RNA, 20 nt, Artificial Sequence
  HTT spacer sequence TTCN PAM
aucagaauucaguguguacg

SEQ ID NO: 33686 - RNA, 20 nt, Artificial Sequence
  HTT spacer sequence TTCN PAM
gauagaacuauagugaaagu

SEQ ID NO: 33687 - RNA, 20 nt, Artificial Sequence
  HTT spacer sequence TTCN PAM
guguguacguuauuaugccu

SEQ ID NO: 33688 - RNA, 20 nt, Artificial Sequence
  HTT spacer sequence TTCN PAM
uugauuguguuucuuauuug

SEQ ID NO: 33689 - RNA, 20 nt, Artificial Sequence
  HTT spacer sequence TTCN PAM
uauuugaugagaaagcugug

SEQ ID NO: 33690 - RNA, 20 nt, Artificial Sequence
  HTT spacer sequence TTCN PAM
caucaaauaagaaacacaau

SEQ ID NO: 33691 - RNA, 20 nt, Artificial Sequence
  HTT spacer sequence TTCN PAM
acccagagcaaaaaacacag

SEQ ID NO: 33692 - RNA, 20 nt, Artificial Sequence
  HTT spacer sequence TTCN PAM
ucuguccuccuccuccuccc

SEQ ID NO: 33693 - RNA, 20 nt, Artificial Sequence
  HTT spacer sequence TTCN PAM
uggccauagcuggguucuca

SEQ ID NO: 33694 - RNA, 20 nt, Artificial Sequence
  HTT spacer sequence TTCN PAM
cagcacccggggaucugcug

SEQ ID NO: 33695 - RNA, 20 nt, Artificial Sequence
  HTT spacer sequence TTCN PAM
auaggggccuggccuaugag

SEQ ID NO: 33696 - RNA, 20 nt, Artificial Sequence
  HTT spacer sequence TTCN PAM
aggugacccagugcugggga

SEQ ID NO: 33697 - RNA, 20 nt, Artificial Sequence
  HTT spacer sequence TTCN PAM
uaaggaugcuggccccagca

SEQ ID NO: 33698 - RNA, 20 nt, Artificial Sequence
  HTT spacer sequence TTCN PAM
ugauuggggccuucagcagc

SEQ ID NO: 33699 - RNA, 20 nt, Artificial Sequence
  HTT spacer sequence TTCN PAM
gcagcaccagcuucuugggc

SEQ ID NO: 33700 - RNA, 20 nt, Artificial Sequence
  HTT spacer sequence TTCN PAM
ugggcaggcuggugcuggcu

SEQ ID NO: 33701 - RNA, 20 nt, Artificial Sequence
  HTT spacer sequence TTCN PAM
ucaccaugucguguucaauc

SEQ ID NO: 33702 - RNA, 20 nt, Artificial Sequence
  HTT spacer sequence TTCN PAM
aucuucuuccagauccugac

SEQ ID NO: 33703 - RNA, 20 nt, Artificial Sequence
  HTT spacer sequence TTCN PAM
uccagauccugacuucuagg

SEQ ID NO: 33704 - RNA, 20 nt, Artificial Sequence
  HTT spacer sequence TTCN PAM
agauccugacuucuagguuc

SEQ ID NO: 33705 - RNA, 20 nt, Artificial Sequence
  HTT spacer sequence TTCN PAM
agguucagcuuuccucagac

SEQ ID NO: 33706 - RNA, 20 nt, Artificial Sequence
  HTT spacer sequence TTCN PAM
gcuuuccucagacccugguu

SEQ ID NO: 33707 - RNA, 20 nt, Artificial Sequence
  HTT spacer sequence TTCN PAM
ucagacccugguuccuuuca

SEQ ID NO: 33708 - RNA, 20 nt, Artificial Sequence
  HTT spacer sequence TTCN PAM
uuucagaggccauugcugcu

SEQ ID NO: 33709 - RNA, 20 nt, Artificial Sequence
  HTT spacer sequence TTCN PAM
gaggccauugcugcugccuu

SEQ ID NO: 33710 - RNA, 20 nt, Artificial Sequence
  HTT spacer sequence TTCN PAM
uggaguuaaucuucacaucu

SEQ ID NO: 33711 - RNA, 20 nt, Artificial Sequence
  HTT spacer sequence TTCN PAM
caucuguuuucuuggaguua

SEQ ID NO: 33712 - RNA, 20 nt, Artificial Sequence
  HTT spacer sequence TTCN PAM
uggaguuaaucguuaccucu

SEQ ID NO: 33713 - RNA, 20 nt, Artificial Sequence
  HTT spacer sequence TTCN PAM
uuggccuuuuugucuucuca

SEQ ID NO: 33714 - RNA, 20 nt, Artificial Sequence
  HTT spacer sequence TTCN PAM
cacaccuuccaacuucuuug

SEQ ID NO: 33715 - RNA, 20 nt, Artificial Sequence
  HTT spacer sequence TTCN PAM
aacuucuuuguaauaugugu

SEQ ID NO: 33716 - RNA, 20 nt, Artificial Sequence
  HTT spacer sequence TTCN PAM
uuguaauauguguuuaguac

SEQ ID NO: 33717 - RNA, 20 nt, Artificial Sequence
  HTT spacer sequence TTCN PAM
ugacagguaguuuacugaau

SEQ ID NO: 33718 - RNA, 20 nt, Artificial Sequence
  HTT spacer sequence TTCN PAM
guaaacuaccugucaugaaa

SEQ ID NO: 33719 - RNA, 20 nt, Artificial Sequence
  HTT spacer sequence TTCN PAM
ccaguguggucauccaacuu

SEQ ID NO: 33720 - RNA, 20 nt, Artificial Sequence
  HTT spacer sequence TTCN PAM
ggucuguaguacacuuguau

SEQ ID NO: 33721 - RNA, 20 nt, Artificial Sequence
  HTT spacer sequence TTCN PAM
cuuugccauuagccuggaau

SEQ ID NO: 33722 - RNA, 20 nt, Artificial Sequence
  HTT spacer sequence TTCN PAM
aggcuaauggcaaagagaag

SEQ ID NO: 33723 - RNA, 20 nt, Artificial Sequence
  HTT spacer sequence TTCN PAM
uuugcaguucucccguugga

SEQ ID NO: 33724 - RNA, 20 nt, Artificial Sequence
  HTT spacer sequence TTCN PAM
cccguuggaugcccaguucc

SEQ ID NO: 33725 - RNA, 20 nt, Artificial Sequence
  HTT spacer sequence TTCN PAM
uagaugccauauguuuuucu

SEQ ID NO: 33726 - RNA, 20 nt, Artificial Sequence
  HTT spacer sequence TTCN PAM
aucgucuaguagcuuccuga

SEQ ID NO: 33727 - RNA, 20 nt, Artificial Sequence
  HTT spacer sequence TTCN PAM
ugagagaagaugaaugggag

SEQ ID NO: 33728 - RNA, 20 nt, Artificial Sequence
  HTT spacer sequence TTCN PAM
cucaggaagcuacuagacga

SEQ ID NO: 33729 - RNA, 20 nt, Artificial Sequence
  HTT spacer sequence TTCN PAM
ucuucucucaggaagcuacu

SEQ ID NO: 33730 - RNA, 20 nt, Artificial Sequence
  HTT spacer sequence TTCN PAM
cucccauucaucuucucuca

SEQ ID NO: 33731 - RNA, 20 nt, Artificial Sequence
  HTT spacer sequence TTCN PAM
uaaaaaugccauuuuuuuuc

SEQ ID NO: 33732 - RNA, 20 nt, Artificial Sequence
  HTT spacer sequence TTCN PAM
uguacacuuggcuggguaug

SEQ ID NO: 33733 - RNA, 20 nt, Artificial Sequence
  HTT spacer sequence TTCN PAM
gggguagaaaucauuuuccc

SEQ ID NO: 33734 - RNA, 20 nt, Artificial Sequence
  HTT spacer sequence TTCN PAM
accccagaacaccauaccca

SEQ ID NO: 33735 - RNA, 20 nt, Artificial Sequence
  HTT spacer sequence TTCN PAM
cucagaaaugcaaagucuuu

SEQ ID NO: 33736 - RNA, 20 nt, Artificial Sequence
  HTT spacer sequence TTCN PAM
gagggaaaaugauuucuacc

SEQ ID NO: 33737 - RNA, 20 nt, Artificial Sequence
  HTT spacer sequence TTCN PAM
uuaaccuaugaauguacuuu

SEQ ID NO: 33738 - RNA, 20 nt, Artificial Sequence
  HTT spacer sequence TTCN PAM
uagguuaaggaaucggguca

SEQ ID NO: 33739 - RNA, 20 nt, Artificial Sequence
  HTT spacer sequence TTCN PAM
uuggaagcuuuccauuuuug

SEQ ID NO: 33740 - RNA, 20 nt, Artificial Sequence
  HTT spacer sequence TTCN PAM
aaagaaaaguacauucauag

SEQ ID NO: 33741 - RNA, 20 nt, Artificial Sequence
  HTT spacer sequence TTCN PAM
auuuuuggggaggugaagug

SEQ ID NO: 33742 - RNA, 20 nt, Artificial Sequence
  HTT spacer sequence TTCN PAM
ccuccccaaaaauggaaagc

SEQ ID NO: 33743 - RNA, 20 nt, Artificial Sequence
  HTT spacer sequence TTCN PAM
aaauuaaaaggccuacuaag

SEQ ID NO: 33744 - RNA, 20 nt, Artificial Sequence
  HTT spacer sequence TTCN PAM
guucugggaaaauuuucuua

SEQ ID NO: 33745 - RNA, 20 nt, Artificial Sequence
  HTT spacer sequence TTCN PAM
gggaaaauuuucuuaacauu

SEQ ID NO: 33746 - RNA, 20 nt, Artificial Sequence
  HTT spacer sequence TTCN PAM
cagaacugaagggauguaag

SEQ ID NO: 33747 - RNA, 20 nt, Artificial Sequence
  HTT spacer sequence TTCN PAM
uaacauuucucugagaaguu

SEQ ID NO: 33748 - RNA, 20 nt, Artificial Sequence
  HTT spacer sequence TTCN PAM
cugagaaguucuugccuuuu

SEQ ID NO: 33749 - RNA, 20 nt, Artificial Sequence
  HTT spacer sequence TTCN PAM
cagagaaauguuaagaaaau

SEQ ID NO: 33750 - RNA, 20 nt, Artificial Sequence
  HTT spacer sequence TTCN PAM
ugccuuuuauuuucuguguu

SEQ ID NO: 33751 - RNA, 20 nt, Artificial Sequence
  HTT spacer sequence TTCN PAM
guguucucuccugaaauugg

SEQ ID NO: 33752 - RNA, 20 nt, Artificial Sequence
  HTT spacer sequence TTCN PAM
cuccugaaauugguuaguug

SEQ ID NO: 33753 - RNA, 20 nt, Artificial Sequence
  HTT spacer sequence TTCN PAM
ggagagaacacagaaaauaa

SEQ ID NO: 33754 - RNA, 20 nt, Artificial Sequence
  HTT spacer sequence TTCN PAM
uuucuuuuucugguacuuuu

SEQ ID NO: 33755 - RNA, 20 nt, Artificial Sequence
  HTT spacer sequence TTCN PAM
uuuucugguacuuuuuagau

SEQ ID NO: 33756 - RNA, 20 nt, Artificial Sequence
  HTT spacer sequence TTCN PAM
gguacuuuuuagauauccau

SEQ ID NO: 33757 - RNA, 20 nt, Artificial Sequence
  HTT spacer sequence TTCN PAM
auucauuguuauguuuuuaa

SEQ ID NO: 33758 - RNA, 20 nt, Artificial Sequence
  HTT spacer sequence TTCN PAM
uuguuauguuuuuaacuucu

SEQ ID NO: 33759 - RNA, 20 nt, Artificial Sequence
  HTT spacer sequence TTCN PAM
uucuuuucuuugucucuuga

SEQ ID NO: 33760 - RNA, 20 nt, Artificial Sequence
  HTT spacer sequence TTCN PAM
uuucuuugucucuugauggg

SEQ ID NO: 33761 - RNA, 20 nt, Artificial Sequence
  HTT spacer sequence TTCN PAM
uugucucuugauggggucuu

SEQ ID NO: 33762 - RNA, 20 nt, Artificial Sequence
  HTT spacer sequence TTCN PAM
ugggcucaagcagcuguucu

SEQ ID NO: 33763 - RNA, 20 nt, Artificial Sequence
  HTT spacer sequence TTCN PAM
gccucacccucccaaguagu

SEQ ID NO: 33764 - RNA, 20 nt, Artificial Sequence
  HTT spacer sequence TTCN PAM
uuacuuuuuuuuuuuuuuuu

SEQ ID NO: 33765 - RNA, 20 nt, Artificial Sequence
  HTT spacer sequence TTCN PAM
agcaguucuccugccucagc

SEQ ID NO: 33766 - RNA, 20 nt, Artificial Sequence
  HTT spacer sequence TTCN PAM
ccugccucagccucucaagu

SEQ ID NO: 33767 - RNA, 20 nt, Artificial Sequence
  HTT spacer sequence TTCN PAM
ccauguuggccaggcugguc

SEQ ID NO: 33768 - RNA, 20 nt, Artificial Sequence
  HTT spacer sequence TTCN PAM
agaccagccuggccaacaug

SEQ ID NO: 33769 - RNA, 20 nt, Artificial Sequence
  HTT spacer sequence TTCN PAM
gaggccaaggcaggcggauc

SEQ ID NO: 33770 - RNA, 20 nt, Artificial Sequence
  HTT spacer sequence TTCN PAM
ucuugagucagcuaguaucc

SEQ ID NO: 33771 - RNA, 20 nt, Artificial Sequence
  HTT spacer sequence TTCN PAM
agggauacuagcugacucaa

SEQ ID NO: 33772 - RNA, 20 nt, Artificial Sequence
  HTT spacer sequence TTCN PAM
uuccagggauacuagcugac

SEQ ID NO: 33773 - RNA, 20 nt, Artificial Sequence
  HTT spacer sequence TTCN PAM
ugcuuggaggcuauaagcuu

SEQ ID NO: 33774 - RNA, 20 nt, Artificial Sequence
  HTT spacer sequence TTCN PAM
aguccccgguugcaggauaa

SEQ ID NO: 33775 - RNA, 20 nt, Artificial Sequence
  HTT spacer sequence TTCN PAM
gugugcaucucacgucuguc

SEQ ID NO: 33776 - RNA, 20 nt, Artificial Sequence
  HTT spacer sequence TTCN PAM
ugggcugccuuggauuggag

SEQ ID NO: 33777 - RNA, 20 nt, Artificial Sequence
  HTT spacer sequence TTCN PAM
cuccaauccaaggcagccca

SEQ ID NO: 33778 - RNA, 20 nt, Artificial Sequence
  HTT spacer sequence TTCN PAM
cacccacucaccugaggucu

SEQ ID NO: 33779 - RNA, 20 nt, Artificial Sequence
  HTT spacer sequence TTCN PAM
cccucuccaucccuccacuu

SEQ ID NO: 33780 - RNA, 20 nt, Artificial Sequence
  HTT spacer sequence TTCN PAM
gauguauguggcgccuccaa

SEQ ID NO: 33781 - RNA, 20 nt, Artificial Sequence
  HTT spacer sequence TTCN PAM
uggcgucuguggcuucaaua

SEQ ID NO: 33782 - RNA, 20 nt, Artificial Sequence
  HTT spacer sequence TTCN PAM
auaagcuugcuuuuugcugg

SEQ ID NO: 33783 - RNA, 20 nt, Artificial Sequence
  HTT spacer sequence TTCN PAM
aaugcaagcuuugcugggga

SEQ ID NO: 33784 - RNA, 20 nt, Artificial Sequence
  HTT spacer sequence TTCN PAM
uccuacgggcuaacaaauca

SEQ ID NO: 33785 - RNA, 20 nt, Artificial Sequence
  HTT spacer sequence TTCN PAM
uacgggcuaacaaaucaguc

SEQ ID NO: 33786 - RNA, 20 nt, Artificial Sequence
  HTT spacer sequence TTCN PAM
gaaguuuuguugacacccgu

SEQ ID NO: 33787 - RNA, 20 nt, Artificial Sequence
  HTT spacer sequence TTCN PAM
gaagcuaaaaaguaacaaga

SEQ ID NO: 33788 - RNA, 20 nt, Artificial Sequence
  HTT spacer sequence TTCN PAM
guucuuucuguucguguaaa

SEQ ID NO: 33789 - RNA, 20 nt, Artificial Sequence
  HTT spacer sequence TTCN PAM
uucuguucguguaaauauau

SEQ ID NO: 33790 - RNA, 20 nt, Artificial Sequence
  HTT spacer sequence TTCN PAM
guucguguaaauauaugcuu

SEQ ID NO: 33791 - RNA, 20 nt, Artificial Sequence
  HTT spacer sequence TTCN PAM
uguaaauauaugcuuuauac

SEQ ID NO: 33792 - RNA, 20 nt, Artificial Sequence
  HTT spacer sequence TTCN PAM
uuacaugauuuuuguggggu

SEQ ID NO: 33793 - RNA, 20 nt, Artificial Sequence
  HTT spacer sequence TTCN PAM
ggguagcagagcuucacaag

SEQ ID NO: 33794 - RNA, 20 nt, Artificial Sequence
  HTT spacer sequence TTCN PAM
caaguucaauccagcguguu

SEQ ID NO: 33795 - RNA, 20 nt, Artificial Sequence
  HTT spacer sequence TTCN PAM
auccagcguguuggauuaga

SEQ ID NO: 33796 - RNA, 20 nt, Artificial Sequence
  HTT spacer sequence TTCN PAM
aauccaacacgcuggauuga

SEQ ID NO: 33797 - RNA, 20 nt, Artificial Sequence
  HTT spacer sequence TTCN PAM
uauucucaaaauuaccugcc

SEQ ID NO: 33798 - RNA, 20 nt, Artificial Sequence
  HTT spacer sequence TTCN PAM
caaaauuaccugccaaacac

SEQ ID NO: 33799 - RNA, 20 nt, Artificial Sequence
  HTT spacer sequence TTCN PAM
uuuuccugacaggaaaugua

SEQ ID NO: 33800 - RNA, 20 nt, Artificial Sequence
  HTT spacer sequence TTCN PAM
ugacaggaaauguacauacc

SEQ ID NO: 33801 - RNA, 20 nt, Artificial Sequence
  HTT spacer sequence TTCN PAM
ugucaggaaaaggaaaaaca

SEQ ID NO: 33802 - RNA, 20 nt, Artificial Sequence
  HTT spacer sequence TTCN PAM
guccuguaugguauguacau

SEQ ID NO: 33803 - RNA, 20 nt, Artificial Sequence
  HTT spacer sequence TTCN PAM
ccaagggauacacuaaugau

SEQ ID NO: 33804 - RNA, 20 nt, Artificial Sequence
  HTT spacer sequence TTCN PAM
cuuugugguuauucaccaag

SEQ ID NO: 33805 - RNA, 20 nt, Artificial Sequence
  HTT spacer sequence TTCN PAM
gucuugaccuggguggcggu

SEQ ID NO: 33806 - RNA, 20 nt, Artificial Sequence
  HTT spacer sequence TTCN PAM
gagugcuugguaauauucug

SEQ ID NO: 33807 - RNA, 20 nt, Artificial Sequence
  HTT spacer sequence TTCN PAM
cccgucacugcuccugccuu

SEQ ID NO: 33808 - RNA, 20 nt, Artificial Sequence
  HTT spacer sequence TTCN PAM
uccccaaggucaugacugcu

SEQ ID NO: 33809 - RNA, 20 nt, Artificial Sequence
  HTT spacer sequence TTCN PAM
aauuccagagucuguuuuua

SEQ ID NO: 33810 - RNA, 20 nt, Artificial Sequence
  HTT spacer sequence TTCN PAM
agagucuguuuuuaaauucu

SEQ ID NO: 33811 - RNA, 20 nt, Artificial Sequence
  HTT spacer sequence TTCN PAM
guguacauagaccauggauu

SEQ ID NO: 33812 - RNA, 20 nt, Artificial Sequence
  HTT spacer sequence TTCN PAM
uuuugucugguuuauuuugg

SEQ ID NO: 33813 - RNA, 20 nt, Artificial Sequence
  HTT spacer sequence TTCN PAM
ugagagucuucuauauuauc

SEQ ID NO: 33814 - RNA, 20 nt, Artificial Sequence
  HTT spacer sequence TTCN PAM
auauuaucguguguauuagu

SEQ ID NO: 33815 - RNA, 20 nt, Artificial Sequence
  HTT spacer sequence TTCN PAM
uguaguuuuaggagcuucau

SEQ ID NO: 33816 - RNA, 20 nt, Artificial Sequence
  HTT spacer sequence TTCN PAM
uagcauuccauuguagggau

SEQ ID NO: 33817 - RNA, 20 nt, Artificial Sequence
  HTT spacer sequence TTCN PAM
auuguagggauauaccacag

SEQ ID NO: 33818 - RNA, 20 nt, Artificial Sequence
  HTT spacer sequence TTCN PAM
uuguauuaucacuggguugu

SEQ ID NO: 33819 - RNA, 20 nt, Artificial Sequence
  HTT spacer sequence TTCN PAM
aguucuuggcuauugcgagc

SEQ ID NO: 33820 - RNA, 20 nt, Artificial Sequence
  HTT spacer sequence TTCN PAM
uggcuauugcgagcagugcu

SEQ ID NO: 33821 - RNA, 20 nt, Artificial Sequence
  HTT spacer sequence TTCN PAM
aucuugcacagcuagaggug

SEQ ID NO: 33822 - RNA, 20 nt, Artificial Sequence
  HTT spacer sequence TTCN PAM
acugcagcugagaugcacac

SEQ ID NO: 33823 - RNA, 20 nt, Artificial Sequence
  HTT spacer sequence TTCN PAM
uugagugcuuguaccagcuc

SEQ ID NO: 33824 - RNA, 20 nt, Artificial Sequence
  HTT spacer sequence TTCN PAM
aggagcucugguccucgcua

SEQ ID NO: 33825 - RNA, 20 nt, Artificial Sequence
  HTT spacer sequence TTCN PAM
aagugcuagcgaggaccaga

SEQ ID NO: 33826 - RNA, 20 nt, Artificial Sequence
  HTT spacer sequence TTCN PAM
ugauggguguuuucuggaau

SEQ ID NO: 33827 - RNA, 20 nt, Artificial Sequence
  HTT spacer sequence TTCN PAM
ggaaucacauuaugauuuua

SEQ ID NO: 33828 - RNA, 20 nt, Artificial Sequence
  HTT spacer sequence TTCN PAM
agaaaacacccaucaggaag

SEQ ID NO: 33829 - RNA, 20 nt, Artificial Sequence
  HTT spacer sequence TTCN PAM
auuccuuaaaguacccuugg

SEQ ID NO: 33830 - RNA, 20 nt, Artificial Sequence
  HTT spacer sequence TTCN PAM
uuaaaguacccuuggcucug

SEQ ID NO: 33831 - RNA, 20 nt, Artificial Sequence
  HTT spacer sequence TTCN PAM
gagccaaggguacuuuaagg

SEQ ID NO: 33832 - RNA, 20 nt, Artificial Sequence
  HTT spacer sequence TTCN PAM
ugcaucucuucccuuuugaa

SEQ ID NO: 33833 - RNA, 20 nt, Artificial Sequence
  HTT spacer sequence TTCN PAM
cuuuugaaguacucuuacag

SEQ ID NO: 33834 - RNA, 20 nt, Artificial Sequence
  HTT spacer sequence TTCN PAM
aaagggaagagaugcaugaa

SEQ ID NO: 33835 - RNA, 20 nt, Artificial Sequence
  HTT spacer sequence TTCN PAM
acacaugcacaacauaccug

SEQ ID NO: 33836 - RNA, 20 nt, Artificial Sequence
  HTT spacer sequence TTCN PAM
aaaauacaguaugccuccuc

SEQ ID NO: 33837 - RNA, 20 nt, Artificial Sequence
  HTT spacer sequence TTCN PAM
aacacagaggaggcauacug

SEQ ID NO: 33838 - RNA, 20 nt, Artificial Sequence
  HTT spacer sequence TTCN PAM
ccaagccagcuaacaggagg

SEQ ID NO: 33839 - RNA, 20 nt, Artificial Sequence
  HTT spacer sequence TTCN PAM
ugggauuguagagauuagac

SEQ ID NO: 33840 - RNA, 20 nt, Artificial Sequence
  HTT spacer sequence TTCN PAM
uuauuauuccaaacuauuua

SEQ ID NO: 33841 - RNA, 20 nt, Artificial Sequence
  HTT spacer sequence TTCN PAM
aaacuauuuaagcucaccgu

SEQ ID NO: 33842 - RNA, 20 nt, Artificial Sequence
  HTT spacer sequence TTCN PAM
uugagacagagucuugcucu

SEQ ID NO: 33843 - RNA, 20 nt, Artificial Sequence
  HTT spacer sequence TTCN PAM
agugauucuugugccucagc

SEQ ID NO: 33844 - RNA, 20 nt, Artificial Sequence
  HTT spacer sequence TTCN PAM
ugugccucagcuucucaagu

SEQ ID NO: 33845 - RNA, 20 nt, Artificial Sequence
  HTT spacer sequence TTCN PAM
caaguagcugagacugcagg

SEQ ID NO: 33846 - RNA, 20 nt, Artificial Sequence
  HTT spacer sequence TTCN PAM
ccauguuggccagguugguc

SEQ ID NO: 33847 - RNA, 20 nt, Artificial Sequence
  HTT spacer sequence TTCN PAM
ucagccucccaaagugcugg

SEQ ID NO: 33848 - RNA, 20 nt, Artificial Sequence
  HTT spacer sequence TTCN PAM
gccucccaaagugcugggau

SEQ ID NO: 33849 - RNA, 20 nt, Artificial Sequence
  HTT spacer sequence TTCN PAM
ugcagcuaaaaaaguuuguc

SEQ ID NO: 33850 - RNA, 20 nt, Artificial Sequence
  HTT spacer sequence TTCN PAM
acuuuguucuccagguguuu

SEQ ID NO: 33851 - RNA, 20 nt, Artificial Sequence
  HTT spacer sequence TTCN PAM
ccagguguuuucucagggag

SEQ ID NO: 33852 - RNA, 20 nt, Artificial Sequence
  HTT spacer sequence TTCN PAM
cagggagaaauuggaggcag

SEQ ID NO: 33853 - RNA, 20 nt, Artificial Sequence
  HTT spacer sequence TTCN PAM
cccugagaaaacaccuggag

SEQ ID NO: 33854 - RNA, 20 nt, Artificial Sequence
  HTT spacer sequence TTCN PAM
cuccuugccagccacaggac

SEQ ID NO: 33855 - RNA, 20 nt, Artificial Sequence
  HTT spacer sequence TTCN PAM
ucuagcgcugcuggguuagg

SEQ ID NO: 33856 - RNA, 20 nt, Artificial Sequence
  HTT spacer sequence TTCN PAM
gugugugugucuuuaauucc

SEQ ID NO: 33857 - RNA, 20 nt, Artificial Sequence
  HTT spacer sequence TTCN PAM
caccucuauauuucugugug

SEQ ID NO: 33858 - RNA, 20 nt, Artificial Sequence
  HTT spacer sequence TTCN PAM
cacuucacaccucuauauuu

SEQ ID NO: 33859 - RNA, 20 nt, Artificial Sequence
  HTT spacer sequence TTCN PAM
gggcucucagcucuaaaggc

SEQ ID NO: 33860 - RNA, 20 nt, Artificial Sequence
  HTT spacer sequence TTCN PAM
auagauguuaaauuaacuaa

SEQ ID NO: 33861 - RNA, 20 nt, Artificial Sequence
  HTT spacer sequence TTCN PAM
cauaagggauacuuuuaguu

SEQ ID NO: 33862 - RNA, 20 nt, Artificial Sequence
  HTT spacer sequence TTCN PAM
gcccauccccucguuuccca

SEQ ID NO: 33863 - RNA, 20 nt, Artificial Sequence
  HTT spacer sequence TTCN PAM
uuuaauucggcccauccccu

SEQ ID NO: 33864 - RNA, 20 nt, Artificial Sequence
  HTT spacer sequence TTCN PAM
uaagccacaaacaauagcau

SEQ ID NO: 33865 - RNA, 20 nt, Artificial Sequence
  HTT spacer sequence TTCN PAM
acccugggugggccaggugu

SEQ ID NO: 33866 - RNA, 20 nt, Artificial Sequence
  HTT spacer sequence TTCN PAM
uugcccucauuccugucaac

SEQ ID NO: 33867 - RNA, 20 nt, Artificial Sequence
  HTT spacer sequence TTCN PAM
ugucaacccacaaccuucca

SEQ ID NO: 33868 - RNA, 20 nt, Artificial Sequence
  HTT spacer sequence TTCN PAM
agugugggcauuagggccau

SEQ ID NO: 33869 - RNA, 20 nt, Artificial Sequence
  HTT spacer sequence TTCN PAM
uaauggcccuaaugcccaca

SEQ ID NO: 33870 - RNA, 20 nt, Artificial Sequence
  HTT spacer sequence TTCN PAM
gagauuuuguuuauggccag

SEQ ID NO: 33871 - RNA, 20 nt, Artificial Sequence
  HTT spacer sequence TTCN PAM
cugggaggcgauaagccucu

SEQ ID NO: 33872 - RNA, 20 nt, Artificial Sequence
  HTT spacer sequence TTCN PAM
cagaggcuuaucgccuccca

SEQ ID NO: 33873 - RNA, 20 nt, Artificial Sequence
  HTT spacer sequence TTCN PAM
uggcgugguuagcauagucu

SEQ ID NO: 33874 - RNA, 20 nt, Artificial Sequence
  HTT spacer sequence TTCN PAM
cuuucauggcgugguuagca

SEQ ID NO: 33875 - RNA, 20 nt, Artificial Sequence
  HTT spacer sequence TTCN PAM
gcaugcacugagcaagcacu

SEQ ID NO: 33876 - RNA, 20 nt, Artificial Sequence
  HTT spacer sequence TTCN PAM
aaucauuguucagcaugcac

SEQ ID NO: 33877 - RNA, 20 nt, Artificial Sequence
  HTT spacer sequence TTCN PAM
aaacuaugcucugagccaug

SEQ ID NO: 33878 - RNA, 20 nt, Artificial Sequence
  HTT spacer sequence TTCN PAM
cauuauucaaaacuaugcuc

SEQ ID NO: 33879 - RNA, 20 nt, Artificial Sequence
  HTT spacer sequence TTCN PAM
uaaguaacauagucaccaag

SEQ ID NO: 33880 - RNA, 20 nt, Artificial Sequence
  HTT spacer sequence TTCN PAM
auuuuaggauauuuuuauca

SEQ ID NO: 33881 - RNA, 20 nt, Artificial Sequence
  HTT spacer sequence TTCN PAM
ccuuuggauuguccuagagg

SEQ ID NO: 33882 - RNA, 20 nt, Artificial Sequence
  HTT spacer sequence TTCN PAM
caugggccucuaggacaauc

SEQ ID NO: 33883 - RNA, 20 nt, Artificial Sequence
  HTT spacer sequence TTCN PAM
cuaauuucuuaggagaacag

SEQ ID NO: 33884 - RNA, 20 nt, Artificial Sequence
  HTT spacer sequence TTCN PAM
uaggagaacaguuugugggu

SEQ ID NO: 33885 - RNA, 20 nt, Artificial Sequence
  HTT spacer sequence TTCN PAM
ccuaagaaauuagggaauac

SEQ ID NO: 33886 - RNA, 20 nt, Artificial Sequence
  HTT spacer sequence TTCN PAM
gaucgaagauguuccagucc

SEQ ID NO: 33887 - RNA, 20 nt, Artificial Sequence
  HTT spacer sequence TTCN PAM
aucggaaauaucugcaauuu

SEQ ID NO: 33888 - RNA, 20 nt, Artificial Sequence
  HTT spacer sequence TTCN PAM
aguccugagaacuucgugac

SEQ ID NO: 33889 - RNA, 20 nt, Artificial Sequence
  HTT spacer sequence TTCN PAM
caggacuggaacaucuucga

SEQ ID NO: 33890 - RNA, 20 nt, Artificial Sequence
  HTT spacer sequence TTCN PAM
ugacauuagcaggacuucua

SEQ ID NO: 33891 - RNA, 20 nt, Artificial Sequence
  HTT spacer sequence TTCN PAM
acaagccaucucuuagggug

SEQ ID NO: 33892 - RNA, 20 nt, Artificial Sequence
  HTT spacer sequence TTCN PAM
ccuuaacuuugucauuuguu

SEQ ID NO: 33893 - RNA, 20 nt, Artificial Sequence
  HTT spacer sequence TTCN PAM
agauacacucugcccacagu

SEQ ID NO: 33894 - RNA, 20 nt, Artificial Sequence
  HTT spacer sequence TTCN PAM
cucaggggacugcucagcau

SEQ ID NO: 33895 - RNA, 20 nt, Artificial Sequence
  HTT spacer sequence TTCN PAM
uuauaaccuucacucagggg

SEQ ID NO: 33896 - RNA, 20 nt, Artificial Sequence
  HTT spacer sequence TTCN PAM
guucagcuguaggaaaagcc

SEQ ID NO: 33897 - RNA, 20 nt, Artificial Sequence
  HTT spacer sequence TTCN PAM
gcuguaggaaaagccucaaa

SEQ ID NO: 33898 - RNA, 20 nt, Artificial Sequence
  HTT spacer sequence TTCN PAM
uacagcugaacugaaguacc

SEQ ID NO: 33899 - RNA, 20 nt, Artificial Sequence
  HTT spacer sequence TTCN PAM
ugcaaaguauaaacaguuug

SEQ ID NO: 33900 - RNA, 20 nt, Artificial Sequence
  HTT spacer sequence TTCN PAM
aauucuugcaaaguauaaac

SEQ ID NO: 33901 - RNA, 20 nt, Artificial Sequence
  HTT spacer sequence TTCN PAM
aauucacguuaaguuuuaug

SEQ ID NO: 33902 - RNA, 20 nt, Artificial Sequence
  HTT spacer sequence TTCN PAM
cguuaaguuuuauguaauac

SEQ ID NO: 33903 - RNA, 20 nt, Artificial Sequence
  HTT spacer sequence TTCN PAM
uaggagcuucaucuuuuauc

SEQ ID NO: 33904 - RNA, 20 nt, Artificial Sequence
  HTT spacer sequence TTCN PAM
ucuuuuaucuacuuggacuu

SEQ ID NO: 33905 - RNA, 20 nt, Artificial Sequence
  HTT spacer sequence TTCN PAM
guagguuuuguuaaaggccu

SEQ ID NO: 33906 - RNA, 20 nt, Artificial Sequence
  HTT spacer sequence TTCN PAM
uagcgaaccugaagucaagc

SEQ ID NO: 33907 - RNA, 20 nt, Artificial Sequence
  HTT spacer sequence TTCN PAM
cuaugaaggccuuuaacaaa

SEQ ID NO: 33908 - RNA, 20 nt, Artificial Sequence
  HTT spacer sequence TTCN PAM
gguucgcuaugaaggccuuu

SEQ ID NO: 33909 - RNA, 20 nt, Artificial Sequence
  HTT spacer sequence TTCN PAM
gcggacagcggcuggaucag

SEQ ID NO: 33910 - RNA, 20 nt, Artificial Sequence
  HTT spacer sequence TTCN PAM
ugagugcuggcagaugcuca

SEQ ID NO: 33911 - RNA, 20 nt, Artificial Sequence
  HTT spacer sequence TTCN PAM
auaguuggcuacuaaaugug

SEQ ID NO: 33912 - RNA, 20 nt, Artificial Sequence
  HTT spacer sequence TTCN PAM
acucauaugccuccaccuua

SEQ ID NO: 33913 - RNA, 20 nt, Artificial Sequence
  HTT spacer sequence TTCN PAM
aaggucuaucuugaguacau

SEQ ID NO: 33914 - RNA, 20 nt, Artificial Sequence
  HTT spacer sequence TTCN PAM
agaccaggcuauuuggcacu

SEQ ID NO: 33915 - RNA, 20 nt, Artificial Sequence
  HTT spacer sequence TTCN PAM
aucaaccagugccaaauagc

SEQ ID NO: 33916 - RNA, 20 nt, Artificial Sequence
  HTT spacer sequence TTCN PAM
cauucaaucaaccagugcca

SEQ ID NO: 33917 - RNA, 20 nt, Artificial Sequence
  HTT spacer sequence TTCN PAM
ugcggguucucuguagguca

SEQ ID NO: 33918 - RNA, 20 nt, Artificial Sequence
  HTT spacer sequence TTCN PAM
cuguaggucaguugacaguu

SEQ ID NO: 33919 - RNA, 20 nt, Artificial Sequence
  HTT spacer sequence TTCN PAM
ccuguuguuuggguaacugu

SEQ ID NO: 33920 - RNA, 20 nt, Artificial Sequence
  HTT spacer sequence TTCN PAM
acaguuacccaaacaacagg

SEQ ID NO: 33921 - RNA, 20 nt, Artificial Sequence
  HTT spacer sequence TTCN PAM
uuuccacaguuacccaaaca

SEQ ID NO: 33922 - RNA, 20 nt, Artificial Sequence
  HTT spacer sequence TTCN PAM
gcacuugccaguguucguuu

SEQ ID NO: 33923 - RNA, 20 nt, Artificial Sequence
  HTT spacer sequence TTCN PAM
uaucgcacguccacaugcuc

SEQ ID NO: 33924 - RNA, 20 nt, Artificial Sequence
  HTT spacer sequence TTCN PAM
aaggcagugaggcucucugg

SEQ ID NO: 33925 - RNA, 20 nt, Artificial Sequence
  HTT spacer sequence TTCN PAM
agagagccucacugccuuug

SEQ ID NO: 33926 - RNA, 20 nt, Artificial Sequence
  HTT spacer sequence TTCN PAM
cagugggccucauggcguac

SEQ ID NO: 33927 - RNA, 20 nt, Artificial Sequence
  HTT spacer sequence TTCN PAM
ugaucauguuugugccaucu

SEQ ID NO: 33928 - RNA, 20 nt, Artificial Sequence
  HTT spacer sequence TTCN PAM
uuuuuaacagauuaagccgg

SEQ ID NO: 33929 - RNA, 20 nt, Artificial Sequence
  HTT spacer sequence TTCN PAM
cggcuuaaucuguuaaaaaa

SEQ ID NO: 33930 - RNA, 20 nt, Artificial Sequence
  HTT spacer sequence TTCN PAM
acccccacaggcuuacucgu

SEQ ID NO: 33931 - RNA, 20 nt, Artificial Sequence
  HTT spacer sequence TTCN PAM
ugucgaggaugaacacucca

SEQ ID NO: 33932 - RNA, 20 nt, Artificial Sequence
  HTT spacer sequence TTCN PAM
uccucgacaggaacgaguaa

SEQ ID NO: 33933 - RNA, 20 nt, Artificial Sequence
  HTT spacer sequence TTCN PAM
uggcgugcugcucacccuga

SEQ ID NO: 33934 - RNA, 20 nt, Artificial Sequence
  HTT spacer sequence TTCN PAM
ggcuuguguccuugaccugc

SEQ ID NO: 33935 - RNA, 20 nt, Artificial Sequence
  HTT spacer sequence TTCN PAM
gagugacaaggaaagaaaug

SEQ ID NO: 33936 - RNA, 20 nt, Artificial Sequence
  HTT spacer sequence TTCN PAM
uugucacuccgaagcugccu

SEQ ID NO: 33937 - RNA, 20 nt, Artificial Sequence
  HTT spacer sequence TTCN PAM
uuccuugucacuccgaagcu

SEQ ID NO: 33938 - RNA, 20 nt, Artificial Sequence
  HTT spacer sequence TTCN PAM
auuucuuuccuugucacucc

SEQ ID NO: 33939 - RNA, 20 nt, Artificial Sequence
  HTT spacer sequence TTCN PAM
gcagagcagcuuguccaggu

SEQ ID NO: 33940 - RNA, 20 nt, Artificial Sequence
  HTT spacer sequence TTCN PAM
caugcagggccuagaguaaa

SEQ ID NO: 33941 - RNA, 20 nt, Artificial Sequence
  HTT spacer sequence TTCN PAM
aagaaccgauuaauuuggaa

SEQ ID NO: 33942 - RNA, 20 nt, Artificial Sequence
  HTT spacer sequence TTCN PAM
uugaaugucagucauucaca

SEQ ID NO: 33943 - RNA, 20 nt, Artificial Sequence
  HTT spacer sequence TTCN PAM
aaauuaaucgguucuuugaa

SEQ ID NO: 33944 - RNA, 20 nt, Artificial Sequence
  HTT spacer sequence TTCN PAM
cuuccaaauuaaucgguucu

SEQ ID NO: 33945 - RNA, 20 nt, Artificial Sequence
  HTT spacer sequence TTCN PAM
gccgcuucucuuccaaauua

SEQ ID NO: 33946 - RNA, 20 nt, Artificial Sequence
  HTT spacer sequence TTCN PAM
aacccuaggugcugaccucu

SEQ ID NO: 33947 - RNA, 20 nt, Artificial Sequence
  HTT spacer sequence TTCN PAM
cucuguaugucccugucacc

SEQ ID NO: 33948 - RNA, 20 nt, Artificial Sequence
  HTT spacer sequence TTCN PAM
aaaaccagaggucacgauau

SEQ ID NO: 33949 - RNA, 20 nt, Artificial Sequence
  HTT spacer sequence TTCN PAM
uccacccaguaaauacugau

SEQ ID NO: 33950 - RNA, 20 nt, Artificial Sequence
  HTT spacer sequence TTCN PAM
gcugcagcuucugccccgug

SEQ ID NO: 33951 - RNA, 20 nt, Artificial Sequence
  HTT spacer sequence TTCN PAM
gccccguggaggcuguggcc

SEQ ID NO: 33952 - RNA, 20 nt, Artificial Sequence
  HTT spacer sequence TTCN PAM
gacaccccaaacgaccacgu

SEQ ID NO: 33953 - RNA, 20 nt, Artificial Sequence
  HTT spacer sequence TTCN PAM
gacauuuuguuccgacaccc

SEQ ID NO: 33954 - RNA, 20 nt, Artificial Sequence
  HTT spacer sequence TTCN PAM
cuuuccaaugcagagaaacc

SEQ ID NO: 33955 - RNA, 20 nt, Artificial Sequence
  HTT spacer sequence TTCN PAM
aaugcagagaaaccuugcag

SEQ ID NO: 33956 - RNA, 20 nt, Artificial Sequence
  HTT spacer sequence TTCN PAM
cugcauuggaaagagaaguu

SEQ ID NO: 33957 - RNA, 20 nt, Artificial Sequence
  HTT spacer sequence TTCN PAM
aauguacugugauuggcagu

SEQ ID NO: 33958 - RNA, 20 nt, Artificial Sequence
  HTT spacer sequence TTCN PAM
guucuuuguagcacgcuuac

SEQ ID NO: 33959 - RNA, 20 nt, Artificial Sequence
  HTT spacer sequence TTCN PAM
uuguagcacgcuuacucagg

SEQ ID NO: 33960 - RNA, 20 nt, Artificial Sequence
  HTT spacer sequence TTCN PAM
cuaacuauguaaccaugcag

SEQ ID NO: 33961 - RNA, 20 nt, Artificial Sequence
  HTT spacer sequence TTCN PAM
aaaaauccaauugcuuaaaa

SEQ ID NO: 33962 - RNA, 20 nt, Artificial Sequence
  HTT spacer sequence TTCN PAM
uauccuacaaaacuuagcua

SEQ ID NO: 33963 - RNA, 20 nt, Artificial Sequence
  HTT spacer sequence TTCN PAM
uaauagaaucaugaauugaa

SEQ ID NO: 33964 - RNA, 20 nt, Artificial Sequence
  HTT spacer sequence TTCN PAM
auuaagaaucauuuuaagcc

SEQ ID NO: 33965 - RNA, 20 nt, Artificial Sequence
  HTT spacer sequence TTCN PAM
ugauucuauuaagaaucauu

SEQ ID NO: 33966 - RNA, 20 nt, Artificial Sequence
  HTT spacer sequence TTCN PAM
auucaugauucuauuaagaa

SEQ ID NO: 33967 - RNA, 20 nt, Artificial Sequence
  HTT spacer sequence TTCN PAM
aagcauuuuacaaacacuac

SEQ ID NO: 33968 - RNA, 20 nt, Artificial Sequence
  HTT spacer sequence TTCN PAM
uggcacauguuaaggccaug

SEQ ID NO: 33969 - RNA, 20 nt, Artificial Sequence
  HTT spacer sequence TTCN PAM
uaagaguccacuuuugcuca

SEQ ID NO: 33970 - RNA, 20 nt, Artificial Sequence
  HTT spacer sequence TTCN PAM
guuccaaccagcugcccuuu

SEQ ID NO: 33971 - RNA, 20 nt, Artificial Sequence
  HTT spacer sequence TTCN PAM
aaccagcugcccuuugguua

SEQ ID NO: 33972 - RNA, 20 nt, Artificial Sequence
  HTT spacer sequence TTCN PAM
gaauaaaagcagagucucau

SEQ ID NO: 33973 - RNA, 20 nt, Artificial Sequence
  HTT spacer sequence TTCN PAM
gaaaaauaaccaaagggcag

SEQ ID NO: 33974 - RNA, 20 nt, Artificial Sequence
  HTT spacer sequence TTCN PAM
uucacaaaaaacacugcuga

SEQ ID NO: 33975 - RNA, 20 nt, Artificial Sequence
  HTT spacer sequence TTCN PAM
caaaaaacacugcugagugu

SEQ ID NO: 33976 - RNA, 20 nt, Artificial Sequence
  HTT spacer sequence TTCN PAM
ucuuuaccuugccuuguuuu

SEQ ID NO: 33977 - RNA, 20 nt, Artificial Sequence
  HTT spacer sequence TTCN PAM
caauaaaaagcuagcuuaaa

SEQ ID NO: 33978 - RNA, 20 nt, Artificial Sequence
  HTT spacer sequence TTCN PAM
acacauacaaaaguaucaac

SEQ ID NO: 33979 - RNA, 20 nt, Artificial Sequence
  HTT spacer sequence TTCN PAM
uuuauaauccuacuucuccc

SEQ ID NO: 33980 - RNA, 20 nt, Artificial Sequence
  HTT spacer sequence TTCN PAM
cccuuuuuuuauuauuugaa

SEQ ID NO: 33981 - RNA, 20 nt, Artificial Sequence
  HTT spacer sequence TTCN PAM
aauaauaaaaaaagggagaa

SEQ ID NO: 33982 - RNA, 20 nt, Artificial Sequence
  HTT spacer sequence TTCN PAM
ucuauaaguauuucaguauc

SEQ ID NO: 33983 - RNA, 20 nt, Artificial Sequence
  HTT spacer sequence TTCN PAM
guaucucuauagaugaggac

SEQ ID NO: 33984 - RNA, 20 nt, Artificial Sequence
  HTT spacer sequence TTCN PAM
uuauuuuuaaaacuuuauuu

SEQ ID NO: 33985 - RNA, 20 nt, Artificial Sequence
  HTT spacer sequence TTCN PAM
ugccuguaaucccagaacuu

SEQ ID NO: 33986 - RNA, 20 nt, Artificial Sequence
  HTT spacer sequence TTCN PAM
gggauuacaggcaugaacac

SEQ ID NO: 33987 - RNA, 20 nt, Artificial Sequence
  HTT spacer sequence TTCN PAM
agugauccgcccagcuuggc

SEQ ID NO: 33988 - RNA, 20 nt, Artificial Sequence
  HTT spacer sequence TTCN PAM
cgggcuggucucaaacuccc

SEQ ID NO: 33989 - RNA, 20 nt, Artificial Sequence
  HTT spacer sequence TTCN PAM
ccauguuucccgggcugguc

SEQ ID NO: 33990 - RNA, 20 nt, Artificial Sequence
  HTT spacer sequence TTCN PAM
uuaagacaugggguuucgcc

SEQ ID NO: 33991 - RNA, 20 nt, Artificial Sequence
  HTT spacer sequence TTCN PAM
aggcucaugugacccuccca

SEQ ID NO: 33992 - RNA, 20 nt, Artificial Sequence
  HTT spacer sequence TTCN PAM
gucucaaaaaaacaaaacug

SEQ ID NO: 33993 - RNA, 20 nt, Artificial Sequence
  HTT spacer sequence TTCN PAM
ggucuaacaauggcacuguu

SEQ ID NO: 33994 - RNA, 20 nt, Artificial Sequence
  HTT spacer sequence TTCN PAM
uacaucaaauacccaccaac

SEQ ID NO: 33995 - RNA, 20 nt, Artificial Sequence
  HTT spacer sequence TTCN PAM
cucuacucuuuuggaaucag

SEQ ID NO: 33996 - RNA, 20 nt, Artificial Sequence
  HTT spacer sequence TTCN PAM
aaaagaguagagagaaaaau

SEQ ID NO: 33997 - RNA, 20 nt, Artificial Sequence
  HTT spacer sequence TTCN PAM
ucaaagagauuuacaauccu

SEQ ID NO: 33998 - RNA, 20 nt, Artificial Sequence
  HTT spacer sequence TTCN PAM
ccuccaucccaguuuuuuuc

SEQ ID NO: 33999 - RNA, 20 nt, Artificial Sequence
  HTT spacer sequence TTCN PAM
cuuagaguucauuuauugag

SEQ ID NO: 34000 - RNA, 20 nt, Artificial Sequence
  HTT spacer sequence TTCN PAM
uuuauugagaaaccagauug

SEQ ID NO: 34001 - RNA, 20 nt, Artificial Sequence
  HTT spacer sequence TTCN PAM
caauaaaugaacucuaaggg

SEQ ID NO: 34002 - RNA, 20 nt, Artificial Sequence
  HTT spacer sequence TTCN PAM
aaguuuuccuguggucugau

SEQ ID NO: 34003 - RNA, 20 nt, Artificial Sequence
  HTT spacer sequence TTCN PAM
uguggucugauauacugcuu

SEQ ID NO: 34004 - RNA, 20 nt, Artificial Sequence
  HTT spacer sequence TTCN PAM
aucuccacuguguaaauuaa

SEQ ID NO: 34005 - RNA, 20 nt, Artificial Sequence
  HTT spacer sequence TTCN PAM
cuucucuguauuuccuguaa

SEQ ID NO: 34006 - RNA, 20 nt, Artificial Sequence
  HTT spacer sequence TTCN PAM
cuguauuuccuguaaaucaa

SEQ ID NO: 34007 - RNA, 20 nt, Artificial Sequence
  HTT spacer sequence TTCN PAM
uguaaaucaauaauuggagg

SEQ ID NO: 34008 - RNA, 20 nt, Artificial Sequence
  HTT spacer sequence TTCN PAM
uccaauuauugauuuacagg

SEQ ID NO: 34009 - RNA, 20 nt, Artificial Sequence
  HTT spacer sequence TTCN PAM
uauauaauauuuuaagauaa

SEQ ID NO: 34010 - RNA, 20 nt, Artificial Sequence
  HTT spacer sequence TTCN PAM
auacuuuuuaaaagaguaca

SEQ ID NO: 34011 - RNA, 20 nt, Artificial Sequence
  HTT spacer sequence TTCN PAM
uaaaagcaucaguuaaaaaa

SEQ ID NO: 34012 - RNA, 20 nt, Artificial Sequence
  HTT spacer sequence TTCN PAM
caucagaccaaugaucucua

SEQ ID NO: 34013 - RNA, 20 nt, Artificial Sequence
  HTT spacer sequence TTCN PAM
ccaggccccaccaugugcac

SEQ ID NO: 34014 - RNA, 20 nt, Artificial Sequence
  HTT spacer sequence TTCN PAM
gucaugagccgucacuuaug

SEQ ID NO: 34015 - RNA, 20 nt, Artificial Sequence
  HTT spacer sequence TTCN PAM
acgugcccauaagugacggc

SEQ ID NO: 34016 - RNA, 20 nt, Artificial Sequence
  HTT spacer sequence TTCN PAM
cccaacucugugccggguca

SEQ ID NO: 34017 - RNA, 20 nt, Artificial Sequence
  HTT spacer sequence TTCN PAM
gucuauaaagcuccugucuu

SEQ ID NO: 34018 - RNA, 20 nt, Artificial Sequence
  HTT spacer sequence TTCN PAM
cuccugggacuuagcaaaga

SEQ ID NO: 34019 - RNA, 20 nt, Artificial Sequence
  HTT spacer sequence TTCN PAM
ggacccacccuugcucuguc

SEQ ID NO: 34020 - RNA, 20 nt, Artificial Sequence
  HTT spacer sequence TTCN PAM
cauagauuagcaagagugcu

SEQ ID NO: 34021 - RNA, 20 nt, Artificial Sequence
  HTT spacer sequence TTCN PAM
aacauuugugaacagaucga

SEQ ID NO: 34022 - RNA, 20 nt, Artificial Sequence
  HTT spacer sequence TTCN PAM
caaauguuagaaaccuccgu

SEQ ID NO: 34023 - RNA, 20 nt, Artificial Sequence
  HTT spacer sequence TTCN PAM
aucuguucacaaauguuaga

SEQ ID NO: 34024 - RNA, 20 nt, Artificial Sequence
  HTT spacer sequence TTCN PAM
aggauuacugcaaucccaau

SEQ ID NO: 34025 - RNA, 20 nt, Artificial Sequence
  HTT spacer sequence TTCN PAM
cccucuaucccuguccuucc

SEQ ID NO: 34026 - RNA, 20 nt, Artificial Sequence
  HTT spacer sequence TTCN PAM
ccuucacccucuaucccugu

SEQ ID NO: 34027 - RNA, 20 nt, Artificial Sequence
  HTT spacer sequence TTCN PAM
uaagaccuuucuccaaagua

SEQ ID NO: 34028 - RNA, 20 nt, Artificial Sequence
  HTT spacer sequence TTCN PAM
ccaaaguaaauaaaugaugu

SEQ ID NO: 34029 - RNA, 20 nt, Artificial Sequence
  HTT spacer sequence TTCN PAM
aaaaugugccacaucauuua

SEQ ID NO: 34030 - RNA, 20 nt, Artificial Sequence
  HTT spacer sequence TTCN PAM
aaacucuagauaugauuauc

SEQ ID NO: 34031 - RNA, 20 nt, Artificial Sequence
  HTT spacer sequence TTCN PAM
uuugacuaaaaacuguucuu

SEQ ID NO: 34032 - RNA, 20 nt, Artificial Sequence
  HTT spacer sequence TTCN PAM
uaauuaaauuaccaugagac

SEQ ID NO: 34033 - RNA, 20 nt, Artificial Sequence
  HTT spacer sequence TTCN PAM
auucagcaaauguaguuugg

SEQ ID NO: 34034 - RNA, 20 nt, Artificial Sequence
  HTT spacer sequence TTCN PAM
gcaaauguaguuuggcuaac

SEQ ID NO: 34035 - RNA, 20 nt, Artificial Sequence
  HTT spacer sequence TTCN PAM
aauuaaauaugguuagccaa

SEQ ID NO: 34036 - RNA, 20 nt, Artificial Sequence
  HTT spacer sequence TTCN PAM
ugcauaucuaaaauuaucaa

SEQ ID NO: 34037 - RNA, 20 nt, Artificial Sequence
  HTT spacer sequence TTCN PAM
augugugcuuuucgaaaaag

SEQ ID NO: 34038 - RNA, 20 nt, Artificial Sequence
  HTT spacer sequence TTCN PAM
aaaaaggaauaaauugaaaa

SEQ ID NO: 34039 - RNA, 20 nt, Artificial Sequence
  HTT spacer sequence TTCN PAM
aaaagcacacauggaaagca

SEQ ID NO: 34040 - RNA, 20 nt, Artificial Sequence
  HTT spacer sequence TTCN PAM
uuuuucgaaaagcacacaug

SEQ ID NO: 34041 - RNA, 20 nt, Artificial Sequence
  HTT spacer sequence TTCN PAM
auuuauuccuuuuucgaaaa

SEQ ID NO: 34042 - RNA, 20 nt, Artificial Sequence
  HTT spacer sequence TTCN PAM
ucuauuuuucaauuuauucc

SEQ ID NO: 34043 - RNA, 20 nt, Artificial Sequence
  HTT spacer sequence TTCN PAM
gggcuuccucuauuuuucaa

SEQ ID NO: 34044 - RNA, 20 nt, Artificial Sequence
  HTT spacer sequence TTCN PAM
uggauuucagggcuuccucu

SEQ ID NO: 34045 - RNA, 20 nt, Artificial Sequence
  HTT spacer sequence TTCN PAM
aggaugauugcuguuuggcg

SEQ ID NO: 34046 - RNA, 20 nt, Artificial Sequence
  HTT spacer sequence TTCN PAM
uauuagaaaccauucuucuu

SEQ ID NO: 34047 - RNA, 20 nt, Artificial Sequence
  HTT spacer sequence TTCN PAM
aauacgaacuacgcgccaaa

SEQ ID NO: 34048 - RNA, 20 nt, Artificial Sequence
  HTT spacer sequence TTCN PAM
ucuugaauaaauaguauguu

SEQ ID NO: 34049 - RNA, 20 nt, Artificial Sequence
  HTT spacer sequence TTCN PAM
ugaauaaauaguauguuuaa

SEQ ID NO: 34050 - RNA, 20 nt, Artificial Sequence
  HTT spacer sequence TTCN PAM
agaagaaugguuucuaauac

SEQ ID NO: 34051 - RNA, 20 nt, Artificial Sequence
  HTT spacer sequence TTCN PAM
uaaacauacuauuuauucaa

SEQ ID NO: 34052 - RNA, 20 nt, Artificial Sequence
  HTT spacer sequence TTCN PAM
cucugcccagcuucuuaaac

SEQ ID NO: 34053 - RNA, 20 nt, Artificial Sequence
  HTT spacer sequence TTCN PAM
cccuccuuguugauaauaua

SEQ ID NO: 34054 - RNA, 20 nt, Artificial Sequence
  HTT spacer sequence TTCN PAM
uuuauaaaucuugcugaccc

SEQ ID NO: 34055 - RNA, 20 nt, Artificial Sequence
  HTT spacer sequence TTCN PAM
uacuuggaucacaaauuucc

SEQ ID NO: 34056 - RNA, 20 nt, Artificial Sequence
  HTT spacer sequence TTCN PAM
gcaccuuauuuugcuucaua

SEQ ID NO: 34057 - RNA, 20 nt, Artificial Sequence
  HTT spacer sequence TTCN PAM
cuuacucuaaucuauuacuu

SEQ ID NO: 34058 - RNA, 20 nt, Artificial Sequence
  HTT spacer sequence TTCN PAM
cuuucaaaugacauggagua

SEQ ID NO: 34059 - RNA, 20 nt, Artificial Sequence
  HTT spacer sequence TTCN PAM
aaugacauggaguaguacug

SEQ ID NO: 34060 - RNA, 20 nt, Artificial Sequence
  HTT spacer sequence TTCN PAM
guacuacuccaugucauuug

SEQ ID NO: 34061 - RNA, 20 nt, Artificial Sequence
  HTT spacer sequence TTCN PAM
uucuuucugagucuagguua

SEQ ID NO: 34062 - RNA, 20 nt, Artificial Sequence
  HTT spacer sequence TTCN PAM
uucugagucuagguuauugu

SEQ ID NO: 34063 - RNA, 20 nt, Artificial Sequence
  HTT spacer sequence TTCN PAM
gagucuagguuauugugacu

SEQ ID NO: 34064 - RNA, 20 nt, Artificial Sequence
  HTT spacer sequence TTCN PAM
gaguccagucacaauaaccu

SEQ ID NO: 34065 - RNA, 20 nt, Artificial Sequence
  HTT spacer sequence TTCN PAM
uucugaguccagucacaaua

SEQ ID NO: 34066 - RNA, 20 nt, Artificial Sequence
  HTT spacer sequence TTCN PAM
uuauugcagugaauaacauu

SEQ ID NO: 34067 - RNA, 20 nt, Artificial Sequence
  HTT spacer sequence TTCN PAM
cugcaauaaugaaauauuuc

SEQ ID NO: 34068 - RNA, 20 nt, Artificial Sequence
  HTT spacer sequence TTCN PAM
caaauguuauucacugcaau

SEQ ID NO: 34069 - RNA, 20 nt, Artificial Sequence
  HTT spacer sequence TTCN PAM
uaaauuaugcagugaauaac

SEQ ID NO: 34070 - RNA, 20 nt, Artificial Sequence
  HTT spacer sequence TTCN PAM
cugcauaauuuaugaacaau

SEQ ID NO: 34071 - RNA, 20 nt, Artificial Sequence
  HTT spacer sequence TTCN PAM
uaaauguuauucacugcaua

SEQ ID NO: 34072 - RNA, 20 nt, Artificial Sequence
  HTT spacer sequence TTCN PAM
aggcagagaacauuaaaugu

SEQ ID NO: 34073 - RNA, 20 nt, Artificial Sequence
  HTT spacer sequence TTCN PAM
cugccuagaaguugagccaa

SEQ ID NO: 34074 - RNA, 20 nt, Artificial Sequence
  HTT spacer sequence TTCN PAM
auuuacaugcuccuagguaa

SEQ ID NO: 34075 - RNA, 20 nt, Artificial Sequence
  HTT spacer sequence TTCN PAM
uacuauggagauuuccauuu

SEQ ID NO: 34076 - RNA, 20 nt, Artificial Sequence
  HTT spacer sequence TTCN PAM
guuagcaacagcacugcuuu

SEQ ID NO: 34077 - RNA, 20 nt, Artificial Sequence
  HTT spacer sequence TTCN PAM
ccucaucugcccccuccuaa

SEQ ID NO: 34078 - RNA, 20 nt, Artificial Sequence
  HTT spacer sequence TTCN PAM
uucaccucaucugcccccuc

SEQ ID NO: 34079 - RNA, 20 nt, Artificial Sequence
  HTT spacer sequence TTCN PAM
uuauuacauugagaggagcc

SEQ ID NO: 34080 - RNA, 20 nt, Artificial Sequence
  HTT spacer sequence TTCN PAM
uuguucaaaauggauggcuu

SEQ ID NO: 34081 - RNA, 20 nt, Artificial Sequence
  HTT spacer sequence TTCN PAM
aaauggauggcuuaagaagu

SEQ ID NO: 34082 - RNA, 20 nt, Artificial Sequence
  HTT spacer sequence TTCN PAM
uaagccauccauuuugaaca

SEQ ID NO: 34083 - RNA, 20 nt, Artificial Sequence
  HTT spacer sequence TTCN PAM
gucuugcaggccaucccaag

SEQ ID NO: 34084 - RNA, 20 nt, Artificial Sequence
  HTT spacer sequence TTCN PAM
ugcuacaaagguaguguuga

SEQ ID NO: 34085 - RNA, 20 nt, Artificial Sequence
  HTT spacer sequence TTCN PAM
ggugaaacuuuagguacaaa

SEQ ID NO: 34086 - RNA, 20 nt, Artificial Sequence
  HTT spacer sequence TTCN PAM
ccggaacagagccacauuua

SEQ ID NO: 34087 - RNA, 20 nt, Artificial Sequence
  HTT spacer sequence TTCN PAM
gggguauagaaguuaccauc

SEQ ID NO: 34088 - RNA, 20 nt, Artificial Sequence
  HTT spacer sequence TTCN PAM
auaccccugaaucccagguc

SEQ ID NO: 34089 - RNA, 20 nt, Artificial Sequence
  HTT spacer sequence TTCN PAM
gaugguaacuucuauacccc

SEQ ID NO: 34090 - RNA, 20 nt, Artificial Sequence
  HTT spacer sequence TTCN PAM
acacugucugauuuugaaaa

SEQ ID NO: 34091 - RNA, 20 nt, Artificial Sequence
  HTT spacer sequence TTCN PAM
aaaucagacaguguagaaga

SEQ ID NO: 34092 - RNA, 20 nt, Artificial Sequence
  HTT spacer sequence TTCN PAM
uuuuuucaaaaucagacagu

SEQ ID NO: 34093 - RNA, 20 nt, Artificial Sequence
  HTT spacer sequence TTCN PAM
guauuuuuauuugcuauuug

SEQ ID NO: 34094 - RNA, 20 nt, Artificial Sequence
  HTT spacer sequence TTCN PAM
cugguauucuguauuuuuau

SEQ ID NO: 34095 - RNA, 20 nt, Artificial Sequence
  HTT spacer sequence TTCN PAM
aauuucacugguauucugua

SEQ ID NO: 34096 - RNA, 20 nt, Artificial Sequence
  HTT spacer sequence TTCN PAM
gauacauuaugaguaauuuu

SEQ ID NO: 34097 - RNA, 20 nt, Artificial Sequence
  HTT spacer sequence TTCN PAM
aaaucaugugggacauacuu

SEQ ID NO: 34098 - RNA, 20 nt, Artificial Sequence
  HTT spacer sequence TTCN PAM
cuuuaauuacaguugccaga

SEQ ID NO: 34099 - RNA, 20 nt, Artificial Sequence
  HTT spacer sequence TTCN PAM
uuuucccuuuaauuacaguu

SEQ ID NO: 34100 - RNA, 20 nt, Artificial Sequence
  HTT spacer sequence TTCN PAM
uuauguucauauaaugugau

SEQ ID NO: 34101 - RNA, 20 nt, Artificial Sequence
  HTT spacer sequence TTCN PAM
uauaaugugauauagcaggg

SEQ ID NO: 34102 - RNA, 20 nt, Artificial Sequence
  HTT spacer sequence TTCN PAM
uaacaggccauggaccaaua

SEQ ID NO: 34103 - RNA, 20 nt, Artificial Sequence
  HTT spacer sequence TTCN PAM
ugcugggcagccugguuccu

SEQ ID NO: 34104 - RNA, 20 nt, Artificial Sequence
  HTT spacer sequence TTCN PAM
caccugagcaccgccuccug

SEQ ID NO: 34105 - RNA, 20 nt, Artificial Sequence
  HTT spacer sequence TTCN PAM
cauaggagugcaaacccuau

SEQ ID NO: 34106 - RNA, 20 nt, Artificial Sequence
  HTT spacer sequence TTCN PAM
caauaggguuugcacuccua

SEQ ID NO: 34107 - RNA, 20 nt, Artificial Sequence
  HTT spacer sequence TTCN PAM
cauaaggagcgcacaaccua

SEQ ID NO: 34108 - RNA, 20 nt, Artificial Sequence
  HTT spacer sequence TTCN PAM
accucagaucaucaggcauu

SEQ ID NO: 34109 - RNA, 20 nt, Artificial Sequence
  HTT spacer sequence TTCN PAM
agacgagacuguuccaccuc

SEQ ID NO: 34110 - RNA, 20 nt, Artificial Sequence
  HTT spacer sequence TTCN PAM
acagggccaggggaugguuu

SEQ ID NO: 34111 - RNA, 20 nt, Artificial Sequence
  HTT spacer sequence TTCN PAM
ugggagacaauuuuuccaca

SEQ ID NO: 34112 - RNA, 20 nt, Artificial Sequence
  HTT spacer sequence TTCN PAM
ggcaccagagacugguuuca

SEQ ID NO: 34113 - RNA, 20 nt, Artificial Sequence
  HTT spacer sequence TTCN PAM
caguggcacucauaauagug

SEQ ID NO: 34114 - RNA, 20 nt, Artificial Sequence
  HTT spacer sequence TTCN PAM
cuuuccuagucaccaguuuu

SEQ ID NO: 34115 - RNA, 20 nt, Artificial Sequence
  HTT spacer sequence TTCN PAM
uagucaccaguuuugggaaa

SEQ ID NO: 34116 - RNA, 20 nt, Artificial Sequence
  HTT spacer sequence TTCN PAM
caaaacuggugacuaggaaa

SEQ ID NO: 34117 - RNA, 20 nt, Artificial Sequence
  HTT spacer sequence TTCN PAM
uucucaugcugcuccucuag

SEQ ID NO: 34118 - RNA, 20 nt, Artificial Sequence
  HTT spacer sequence TTCN PAM
caugcugcuccucuagugca

SEQ ID NO: 34119 - RNA, 20 nt, Artificial Sequence
  HTT spacer sequence TTCN PAM
uuaaaaauaaauggagcacu

SEQ ID NO: 34120 - RNA, 20 nt, Artificial Sequence
  HTT spacer sequence TTCN PAM
caugauuuuuuguuauauua

SEQ ID NO: 34121 - RNA, 20 nt, Artificial Sequence
  HTT spacer sequence TTCN PAM
aaauucccaugauuuuuugu

SEQ ID NO: 34122 - RNA, 20 nt, Artificial Sequence
  HTT spacer sequence TTCN PAM
auguuguuuucuaaauuccc

SEQ ID NO: 34123 - RNA, 20 nt, Artificial Sequence
  HTT spacer sequence TTCN PAM
accaaugugaucauuagcuu

SEQ ID NO: 34124 - RNA, 20 nt, Artificial Sequence
  HTT spacer sequence TTCN PAM
cuaucacuuccaccaaugug

SEQ ID NO: 34125 - RNA, 20 nt, Artificial Sequence
  HTT spacer sequence TTCN PAM
cccccuaaauauuucccuau

SEQ ID NO: 34126 - RNA, 20 nt, Artificial Sequence
  HTT spacer sequence TTCN PAM
uugacaaaguuuauaccuua

SEQ ID NO: 34127 - RNA, 20 nt, Artificial Sequence
  HTT spacer sequence TTCN PAM
cuuuuuuguuguuuuuaaua

SEQ ID NO: 34128 - RNA, 20 nt, Artificial Sequence
  HTT spacer sequence TTCN PAM
ggucagaguuuauaaaaugc

SEQ ID NO: 34129 - RNA, 20 nt, Artificial Sequence
  HTT spacer sequence TTCN PAM
cuguuucuagguuuaugaac

SEQ ID NO: 34130 - RNA, 20 nt, Artificial Sequence
  HTT spacer sequence TTCN PAM
agguuuaugaacugacguua

SEQ ID NO: 34131 - RNA, 20 nt, Artificial Sequence
  HTT spacer sequence TTCN PAM
uaaaccuagaaacagagaaa

SEQ ID NO: 34132 - RNA, 20 nt, Artificial Sequence
  HTT spacer sequence TTCN PAM
gaacgccuccacccgagcuu

SEQ ID NO: 34133 - RNA, 20 nt, Artificial Sequence
  HTT spacer sequence TTCN PAM
gaagagcugcugcaacagcu

SEQ ID NO: 34134 - RNA, 20 nt, Artificial Sequence
  HTT spacer sequence TTCN PAM
gcaaacccugaccgcagucg

SEQ ID NO: 34135 - RNA, 20 nt, Artificial Sequence
  HTT spacer sequence TTCN PAM
gccaccagacuccuccuuag

SEQ ID NO: 34136 - RNA, 20 nt, Artificial Sequence
  HTT spacer sequence TTCN PAM
acaauacucccacuacggcu

SEQ ID NO: 34137 - RNA, 20 nt, Artificial Sequence
  HTT spacer sequence TTCN PAM
aucuuccuugccaaaacuua

SEQ ID NO: 34138 - RNA, 20 nt, Artificial Sequence
  HTT spacer sequence TTCN PAM
uugccaaaacuuauaauaca

SEQ ID NO: 34139 - RNA, 20 nt, Artificial Sequence
  HTT spacer sequence TTCN PAM
ucuuuauuuuauaaauaggg

SEQ ID NO: 34140 - RNA, 20 nt, Artificial Sequence
  HTT spacer sequence TTCN PAM
gcacuuuggaaggaucgcuu

SEQ ID NO: 34141 - RNA, 20 nt, Artificial Sequence
  HTT spacer sequence TTCN PAM
aaagugcugaaauuacaggc

SEQ ID NO: 34142 - RNA, 20 nt, Artificial Sequence
  HTT spacer sequence TTCN PAM
gcccaggaguuugagacaac

SEQ ID NO: 34143 - RNA, 20 nt, Artificial Sequence
  HTT spacer sequence TTCN PAM
cugcagccucaaccucuugg

SEQ ID NO: 34144 - RNA, 20 nt, Artificial Sequence
  HTT spacer sequence TTCN PAM
cuuauuuuauuuuuaaauuu

SEQ ID NO: 34145 - RNA, 20 nt, Artificial Sequence
  HTT spacer sequence TTCN PAM
uuucucugccuuggcugccu

SEQ ID NO: 34146 - RNA, 20 nt, Artificial Sequence
  HTT spacer sequence TTCN PAM
cugccuuggcugccuccugu

SEQ ID NO: 34147 - RNA, 20 nt, Artificial Sequence
  HTT spacer sequence TTCN PAM
cagcaccuaaaaugccacag

SEQ ID NO: 34148 - RNA, 20 nt, Artificial Sequence
  HTT spacer sequence TTCN PAM
uuucucagcaccuaaaaugc

SEQ ID NO: 34149 - RNA, 20 nt, Artificial Sequence
  HTT spacer sequence TTCN PAM
cuacuguuuucauuucucag

SEQ ID NO: 34150 - RNA, 20 nt, Artificial Sequence
  HTT spacer sequence TTCN PAM
aggauccucauguuaauuug

SEQ ID NO: 34151 - RNA, 20 nt, Artificial Sequence
  HTT spacer sequence TTCN PAM
ggcaaauuaacaugaggauc

SEQ ID NO: 34152 - RNA, 20 nt, Artificial Sequence
  HTT spacer sequence TTCN PAM
agucgucagagggaucugag

SEQ ID NO: 34153 - RNA, 20 nt, Artificial Sequence
  HTT spacer sequence TTCN PAM
uuccuggccugacuugagaa

SEQ ID NO: 34154 - RNA, 20 nt, Artificial Sequence
  HTT spacer sequence TTCN PAM
uggccugacuugagaaaauc

SEQ ID NO: 34155 - RNA, 20 nt, Artificial Sequence
  HTT spacer sequence TTCN PAM
caagucaggccaggaaggaa

SEQ ID NO: 34156 - RNA, 20 nt, Artificial Sequence
  HTT spacer sequence TTCN PAM
gcugacuccggccucuccua

SEQ ID NO: 34157 - RNA, 20 nt, Artificial Sequence
  HTT spacer sequence TTCN PAM
cucuaauguggaggcuguga

SEQ ID NO: 34158 - RNA, 20 nt, Artificial Sequence
  HTT spacer sequence TTCN PAM
gucagauucucucuaaugug

SEQ ID NO: 34159 - RNA, 20 nt, Artificial Sequence
  HTT spacer sequence TTCN PAM
cacgaggcagcaguaagacu

SEQ ID NO: 34160 - RNA, 20 nt, Artificial Sequence
  HTT spacer sequence TTCN PAM
ggcaaacauuuauguucaca

SEQ ID NO: 34161 - RNA, 20 nt, Artificial Sequence
  HTT spacer sequence TTCN PAM
ugcucaugguucuggcaaac

SEQ ID NO: 34162 - RNA, 20 nt, Artificial Sequence
  HTT spacer sequence TTCN PAM
uguccuuuacacggaagaau

SEQ ID NO: 34163 - RNA, 20 nt, Artificial Sequence
  HTT spacer sequence TTCN PAM
guguaaaggacaggaaacaa

SEQ ID NO: 34164 - RNA, 20 nt, Artificial Sequence
  HTT spacer sequence TTCN PAM
uccguguaaaggacaggaaa

SEQ ID NO: 34165 - RNA, 20 nt, Artificial Sequence
  HTT spacer sequence TTCN PAM
guauggaaugcgugccuuac

SEQ ID NO: 34166 - RNA, 20 nt, Artificial Sequence
  HTT spacer sequence TTCN PAM
auacagaaaaaaauucuucc

SEQ ID NO: 34167 - RNA, 20 nt, Artificial Sequence
  HTT spacer sequence TTCN PAM
acucauuauuuguaaggcac

SEQ ID NO: 34168 - RNA, 20 nt, Artificial Sequence
  HTT spacer sequence TTCN PAM
uuagcgauggguauuuccac

SEQ ID NO: 34169 - RNA, 20 nt, Artificial Sequence
  HTT spacer sequence TTCN PAM
aauacuuuuaauuuggcuuu

SEQ ID NO: 34170 - RNA, 20 nt, Artificial Sequence
  HTT spacer sequence TTCN PAM
uaggucauaucuuuagaacu

SEQ ID NO: 34171 - RNA, 20 nt, Artificial Sequence
  HTT spacer sequence TTCN PAM
aaagauaugaccuaagaaau

SEQ ID NO: 34172 - RNA, 20 nt, Artificial Sequence
  HTT spacer sequence TTCN PAM
aauauauaguucuaaagaua

SEQ ID NO: 34173 - RNA, 20 nt, Artificial Sequence
  HTT spacer sequence TTCN PAM
uauugaaauuaaaauguuga

SEQ ID NO: 34174 - RNA, 20 nt, Artificial Sequence
  HTT spacer sequence TTCN PAM
auaugaaaauuacauuaaca

SEQ ID NO: 34175 - RNA, 20 nt, Artificial Sequence
  HTT spacer sequence TTCN PAM
acauuuuaauuucaauauga

SEQ ID NO: 34176 - RNA, 20 nt, Artificial Sequence
  HTT spacer sequence TTCN PAM
uguggaaaaacguucacauu

SEQ ID NO: 34177 - RNA, 20 nt, Artificial Sequence
  HTT spacer sequence TTCN PAM
acaggaaacacuuaacaucg

SEQ ID NO: 34178 - RNA, 20 nt, Artificial Sequence
  HTT spacer sequence TTCN PAM
cauuuucucuaguuuuaaag

SEQ ID NO: 34179 - RNA, 20 nt, Artificial Sequence
  HTT spacer sequence TTCN PAM
cuaguuuuaaaguugaauca

SEQ ID NO: 34180 - RNA, 20 nt, Artificial Sequence
  HTT spacer sequence TTCN PAM
acuuuaaaacuagagaaaau

SEQ ID NO: 34181 - RNA, 20 nt, Artificial Sequence
  HTT spacer sequence TTCN PAM
aacagcuugauucaacuuua

SEQ ID NO: 34182 - RNA, 20 nt, Artificial Sequence
  HTT spacer sequence TTCN PAM
cauuucuucuagauuuuauc

SEQ ID NO: 34183 - RNA, 20 nt, Artificial Sequence
  HTT spacer sequence TTCN PAM
ucuagauuuuaucagcuugu

SEQ ID NO: 34184 - RNA, 20 nt, Artificial Sequence
  HTT spacer sequence TTCN PAM
agauuuuaucagcuuguuac

SEQ ID NO: 34185 - RNA, 20 nt, Artificial Sequence
  HTT spacer sequence TTCN PAM
gugauuugcagcuggagggg

SEQ ID NO: 34186 - RNA, 20 nt, Artificial Sequence
  HTT spacer sequence TTCN PAM
ucaugcagcccuguccuuuc

SEQ ID NO: 34187 - RNA, 20 nt, Artificial Sequence
  HTT spacer sequence TTCN PAM
agaaaacaaaaaggugauua

SEQ ID NO: 34188 - RNA, 20 nt, Artificial Sequence
  HTT spacer sequence TTCN PAM
ugaaaggacagggcugcaug

SEQ ID NO: 34189 - RNA, 20 nt, Artificial Sequence
  HTT spacer sequence TTCN PAM
gaaaucagagucuuguguug

SEQ ID NO: 34190 - RNA, 20 nt, Artificial Sequence
  HTT spacer sequence TTCN PAM
gaaauaaucaccuuuuuguu

SEQ ID NO: 34191 - RNA, 20 nt, Artificial Sequence
  HTT spacer sequence TTCN PAM
acacaagacucugauuucug

SEQ ID NO: 34192 - RNA, 20 nt, Artificial Sequence
  HTT spacer sequence TTCN PAM
uguauuucuguaauguaaug

SEQ ID NO: 34193 - RNA, 20 nt, Artificial Sequence
  HTT spacer sequence TTCN PAM
guaauguaauguaucuugua

SEQ ID NO: 34194 - RNA, 20 nt, Artificial Sequence
  HTT spacer sequence TTCN PAM
uguaauacuguauuggacuc

SEQ ID NO: 34195 - RNA, 20 nt, Artificial Sequence
  HTT spacer sequence TTCN PAM
cagaugagugauuauaugug

SEQ ID NO: 34196 - RNA, 20 nt, Artificial Sequence
  HTT spacer sequence TTCN PAM
cacauauaaucacucaucug

SEQ ID NO: 34197 - RNA, 20 nt, Artificial Sequence
  HTT spacer sequence TTCN PAM
agcaacauucacacauauaa

SEQ ID NO: 34198 - RNA, 20 nt, Artificial Sequence
  HTT spacer sequence TTCN PAM
ggccugguuaucagauucca

SEQ ID NO: 34199 - RNA, 20 nt, Artificial Sequence
  HTT spacer sequence TTCN PAM
uaucagaauugcuuugucau

SEQ ID NO: 34200 - RNA, 20 nt, Artificial Sequence
  HTT spacer sequence TTCN PAM
gauaugaaaguaauuuuuaa

SEQ ID NO: 34201 - RNA, 20 nt, Artificial Sequence
  HTT spacer sequence TTCN PAM
aaauuuaugacaaagcaauu

SEQ ID NO: 34202 - RNA, 20 nt, Artificial Sequence
  HTT spacer sequence TTCN PAM
aauguucggggucagcagac

SEQ ID NO: 34203 - RNA, 20 nt, Artificial Sequence
  HTT spacer sequence TTCN PAM
gggucagcagacuuuuuuug

SEQ ID NO: 34204 - RNA, 20 nt, Artificial Sequence
  HTT spacer sequence TTCN PAM
gcucugcccugugacaggaa

SEQ ID NO: 34205 - RNA, 20 nt, Artificial Sequence
  HTT spacer sequence TTCN PAM
ugucacagggcagagcugaa

SEQ ID NO: 34206 - RNA, 20 nt, Artificial Sequence
  HTT spacer sequence TTCN PAM
aguagaacuuuacuuacaga

SEQ ID NO: 34207 - RNA, 20 nt, Artificial Sequence
  HTT spacer sequence TTCN PAM
acuggaacauagcuggccag

SEQ ID NO: 34208 - RNA, 20 nt, Artificial Sequence
  HTT spacer sequence TTCN PAM
guaaguaaaguucuacugga

SEQ ID NO: 34209 - RNA, 20 nt, Artificial Sequence
  HTT spacer sequence TTCN PAM
cuaaggcagguauuggcaaa

SEQ ID NO: 34210 - RNA, 20 nt, Artificial Sequence
  HTT spacer sequence TTCN PAM
caguaaauuuuauuuaguau

SEQ ID NO: 34211 - RNA, 20 nt, Artificial Sequence
  HTT spacer sequence TTCN PAM
ugacuaauacuaaauaaaau

SEQ ID NO: 34212 - RNA, 20 nt, Artificial Sequence
  HTT spacer sequence TTCN PAM
uuuccagccuggucaacaua

SEQ ID NO: 34213 - RNA, 20 nt, Artificial Sequence
  HTT spacer sequence TTCN PAM
agccuggucaacauagugag

SEQ ID NO: 34214 - RNA, 20 nt, Artificial Sequence
  HTT spacer sequence TTCN PAM
guugccuaggcuggagugca

SEQ ID NO: 34215 - RNA, 20 nt, Artificial Sequence
  HTT spacer sequence TTCN PAM
uuuguuggguuauuuuaauu

SEQ ID NO: 34216 - RNA, 20 nt, Artificial Sequence
  HTT spacer sequence TTCN PAM
gccauauuuaacuuuguaca

SEQ ID NO: 34217 - RNA, 20 nt, Artificial Sequence
  HTT spacer sequence TTCN PAM
gauauguacaaaguuaaaua

SEQ ID NO: 34218 - RNA, 20 nt, Artificial Sequence
  HTT spacer sequence TTCN PAM
gauaaaacuuaacuuuuauu

SEQ ID NO: 34219 - RNA, 20 nt, Artificial Sequence
  HTT spacer sequence TTCN PAM
uuuccaguguggguuugcau

SEQ ID NO: 34220 - RNA, 20 nt, Artificial Sequence
  HTT spacer sequence TTCN PAM
aguguggguuugcauaggaa

SEQ ID NO: 34221 - RNA, 20 nt, Artificial Sequence
  HTT spacer sequence TTCN PAM
uaugcaaacccacacuggaa

SEQ ID NO: 34222 - RNA, 20 nt, Artificial Sequence
  HTT spacer sequence TTCN PAM
uuuccuaugcaaacccacac

SEQ ID NO: 34223 - RNA, 20 nt, Artificial Sequence
  HTT spacer sequence TTCN PAM
auuuugaaaucuuaaaagac

SEQ ID NO: 34224 - RNA, 20 nt, Artificial Sequence
  HTT spacer sequence TTCN PAM
aaauagaaagugacagcaau

SEQ ID NO: 34225 - RNA, 20 nt, Artificial Sequence
  HTT spacer sequence TTCN PAM
uguuaagaucccauuuaaua

SEQ ID NO: 34226 - RNA, 20 nt, Artificial Sequence
  HTT spacer sequence TTCN PAM
agccuucauugaauuaagua

SEQ ID NO: 34227 - RNA, 20 nt, Artificial Sequence
  HTT spacer sequence TTCN PAM
uugaauuaaguaaacauuuc

SEQ ID NO: 34228 - RNA, 20 nt, Artificial Sequence
  HTT spacer sequence TTCN PAM
augaaggcuagaaugcuauu

SEQ ID NO: 34229 - RNA, 20 nt, Artificial Sequence
  HTT spacer sequence TTCN PAM
uaagagaacuuggaaucuau

SEQ ID NO: 34230 - RNA, 20 nt, Artificial Sequence
  HTT spacer sequence TTCN PAM
cuuaagaaauguuuacuuaa

SEQ ID NO: 34231 - RNA, 20 nt, Artificial Sequence
  HTT spacer sequence TTCN PAM
aaguucucuuaagaaauguu

SEQ ID NO: 34232 - RNA, 20 nt, Artificial Sequence
  HTT spacer sequence TTCN PAM
cuaaaaucucaaacuugauu

SEQ ID NO: 34233 - RNA, 20 nt, Artificial Sequence
  HTT spacer sequence TTCN PAM
aaacaauguuucacuaaaau

SEQ ID NO: 34234 - RNA, 20 nt, Artificial Sequence
  HTT spacer sequence TTCN PAM
aggaaaaauuaaugucuaua

SEQ ID NO: 34235 - RNA, 20 nt, Artificial Sequence
  HTT spacer sequence TTCN PAM
uagaauccuuuuggcuucua

SEQ ID NO: 34236 - RNA, 20 nt, Artificial Sequence
  HTT spacer sequence TTCN PAM
ugaauuaggagagauuuugg

SEQ ID NO: 34237 - RNA, 20 nt, Artificial Sequence
  HTT spacer sequence TTCN PAM
agaauauagacauuaauuuu

SEQ ID NO: 34238 - RNA, 20 nt, Artificial Sequence
  HTT spacer sequence TTCN PAM
uagucgcuuuuuccaguggc

SEQ ID NO: 34239 - RNA, 20 nt, Artificial Sequence
  HTT spacer sequence TTCN PAM
aguggcggugagaacgaaga

SEQ ID NO: 34240 - RNA, 20 nt, Artificial Sequence
  HTT spacer sequence TTCN PAM
caccgccacuggaaaaagcg

SEQ ID NO: 34241 - RNA, 20 nt, Artificial Sequence
  HTT spacer sequence TTCN PAM
uucucaccgccacuggaaaa

SEQ ID NO: 34242 - RNA, 20 nt, Artificial Sequence
  HTT spacer sequence TTCN PAM
cauugcucagaugaguuuau

SEQ ID NO: 34243 - RNA, 20 nt, Artificial Sequence
  HTT spacer sequence TTCN PAM
ggcugggacaugggauauau

SEQ ID NO: 34244 - RNA, 20 nt, Artificial Sequence
  HTT spacer sequence TTCN PAM
cccauugagagcugugucuu

SEQ ID NO: 34245 - RNA, 20 nt, Artificial Sequence
  HTT spacer sequence TTCN PAM
aacucuucuguuauagcugg

SEQ ID NO: 34246 - RNA, 20 nt, Artificial Sequence
  HTT spacer sequence TTCN PAM
guuauagcuggaaaauccuu

SEQ ID NO: 34247 - RNA, 20 nt, Artificial Sequence
  HTT spacer sequence TTCN PAM
agcuauaacagaagaguuug

SEQ ID NO: 34248 - RNA, 20 nt, Artificial Sequence
  HTT spacer sequence TTCN PAM
cuuaaaaaggauuuuccagc

SEQ ID NO: 34249 - RNA, 20 nt, Artificial Sequence
  HTT spacer sequence TTCN PAM
ucugucuuauaauuugggca

SEQ ID NO: 34250 - RNA, 20 nt, Artificial Sequence
  HTT spacer sequence TTCN PAM
cccuaauccuauauccaaca

SEQ ID NO: 34251 - RNA, 20 nt, Artificial Sequence
  HTT spacer sequence TTCN PAM
gguggcagccuagcucuugu

SEQ ID NO: 34252 - RNA, 20 nt, Artificial Sequence
  HTT spacer sequence TTCN PAM
ucaaaggcacaagagcuagg

SEQ ID NO: 34253 - RNA, 20 nt, Artificial Sequence
  HTT spacer sequence TTCN PAM
acagagccguccccagggua

SEQ ID NO: 34254 - RNA, 20 nt, Artificial Sequence
  HTT spacer sequence TTCN PAM
aaaucagugguuugcaaaua

SEQ ID NO: 34255 - RNA, 20 nt, Artificial Sequence
  HTT spacer sequence TTCN PAM
gaucuuaacaaaagccaucu

SEQ ID NO: 34256 - RNA, 20 nt, Artificial Sequence
  HTT spacer sequence TTCN PAM
ccuuuuuggcauuuuauuug

SEQ ID NO: 34257 - RNA, 20 nt, Artificial Sequence
  HTT spacer sequence TTCN PAM
caagguaaagaacuuauuuu

SEQ ID NO: 34258 - RNA, 20 nt, Artificial Sequence
  HTT spacer sequence TTCN PAM
uuaccuugagaaaucaaaua

SEQ ID NO: 34259 - RNA, 20 nt, Artificial Sequence
  HTT spacer sequence TTCN PAM
uauuauuuaguagauaggcc

SEQ ID NO: 34260 - RNA, 20 nt, Artificial Sequence
  HTT spacer sequence TTCN PAM
auguagauuuuggguuuccu

SEQ ID NO: 34261 - RNA, 20 nt, Artificial Sequence
  HTT spacer sequence TTCN PAM
uuugcucauuuuuucacucu

SEQ ID NO: 34262 - RNA, 20 nt, Artificial Sequence
  HTT spacer sequence TTCN PAM
cucuuaaucucacaucauug

SEQ ID NO: 34263 - RNA, 20 nt, Artificial Sequence
  HTT spacer sequence TTCN PAM
auaaacuuacaaugauguga

SEQ ID NO: 34264 - RNA, 20 nt, Artificial Sequence
  HTT spacer sequence TTCN PAM
gacuuuuucuuugaagagca

SEQ ID NO: 34265 - RNA, 20 nt, Artificial Sequence
  HTT spacer sequence TTCN PAM
uugaagagcagaaauuagaa

SEQ ID NO: 34266 - RNA, 20 nt, Artificial Sequence
  HTT spacer sequence TTCN PAM
aagaaaaagucagaaguaug

SEQ ID NO: 34267 - RNA, 20 nt, Artificial Sequence
  HTT spacer sequence TTCN PAM
gcucuucaaagaaaaaguca

SEQ ID NO: 34268 - RNA, 20 nt, Artificial Sequence
  HTT spacer sequence TTCN PAM
aauuucugcucuucaaagaa

SEQ ID NO: 34269 - RNA, 20 nt, Artificial Sequence
  HTT spacer sequence TTCN PAM
caauaauuauuuugauagug

SEQ ID NO: 34270 - RNA, 20 nt, Artificial Sequence
  HTT spacer sequence TTCN PAM
guuuuaaaucauauuaagac

SEQ ID NO: 34271 - RNA, 20 nt, Artificial Sequence
  HTT spacer sequence TTCN PAM
uuuguucucauuaauguaau

SEQ ID NO: 34272 - RNA, 20 nt, Artificial Sequence
  HTT spacer sequence TTCN PAM
cauuaauguaauucugaaga

SEQ ID NO: 34273 - RNA, 20 nt, Artificial Sequence
  HTT spacer sequence TTCN PAM
gaagaugaacaauaaaaugu

SEQ ID NO: 34274 - RNA, 20 nt, Artificial Sequence
  HTT spacer sequence TTCN PAM
gaauuacauuaaugagaaca

SEQ ID NO: 34275 - RNA, 20 nt, Artificial Sequence
  HTT spacer sequence TTCN PAM
ucuucagaauuacauuaaug

SEQ ID NO: 34276 - RNA, 20 nt, Artificial Sequence
  HTT spacer sequence TTCN PAM
aaaaauacauuuuauuguuc

SEQ ID NO: 34277 - RNA, 20 nt, Artificial Sequence
  HTT spacer sequence TTCN PAM
aaugaaauauuauuucaucc

SEQ ID NO: 34278 - RNA, 20 nt, Artificial Sequence
  HTT spacer sequence TTCN PAM
uuugaaaguucuaaaaauac

SEQ ID NO: 34279 - RNA, 20 nt, Artificial Sequence
  HTT spacer sequence TTCN PAM
uccuuccagaucauauaaug

SEQ ID NO: 34280 - RNA, 20 nt, Artificial Sequence
  HTT spacer sequence TTCN PAM
agaucauauaaugcuuaagu

SEQ ID NO: 34281 - RNA, 20 nt, Artificial Sequence
  HTT spacer sequence TTCN PAM
gauuguuaaucauaaagucu

SEQ ID NO: 34282 - RNA, 20 nt, Artificial Sequence
  HTT spacer sequence TTCN PAM
agacuuuaugauuaacaauc

SEQ ID NO: 34283 - RNA, 20 nt, Artificial Sequence
  HTT spacer sequence TTCN PAM
uuuuauuaucuuuuaauuuu

SEQ ID NO: 34284 - RNA, 20 nt, Artificial Sequence
  HTT spacer sequence TTCN PAM
ggugugucauuggagcuaug

SEQ ID NO: 34285 - RNA, 20 nt, Artificial Sequence
  HTT spacer sequence TTCN PAM
ugucauagcuccaaugacac

SEQ ID NO: 34286 - RNA, 20 nt, Artificial Sequence
  HTT spacer sequence TTCN PAM
aaggccaauagcauuggauc

SEQ ID NO: 34287 - RNA, 20 nt, Artificial Sequence
  HTT spacer sequence TTCN PAM
caaacuauaccacaaaacau

SEQ ID NO: 34288 - RNA, 20 nt, Artificial Sequence
  HTT spacer sequence TTCN PAM
auauagguuuauugacuuua

SEQ ID NO: 34289 - RNA, 20 nt, Artificial Sequence
  HTT spacer sequence TTCN PAM
aaacauaacaucucuacauu

SEQ ID NO: 34290 - RNA, 20 nt, Artificial Sequence
  HTT spacer sequence TTCN PAM
uuguguuuaauacuguggag

SEQ ID NO: 34291 - RNA, 20 nt, Artificial Sequence
  HTT spacer sequence TTCN PAM
uaugaguuucauuuuagagu

SEQ ID NO: 34292 - RNA, 20 nt, Artificial Sequence
  HTT spacer sequence TTCN PAM
uuuuagagugcauuuacuua

SEQ ID NO: 34293 - RNA, 20 nt, Artificial Sequence
  HTT spacer sequence TTCN PAM
aaauuaaguaaaugcacucu

SEQ ID NO: 34294 - RNA, 20 nt, Artificial Sequence
  HTT spacer sequence TTCN PAM
uuuuaguuugcuaaaaauaa

SEQ ID NO: 34295 - RNA, 20 nt, Artificial Sequence
  HTT spacer sequence TTCN PAM
ccuaagagcacuuugccuag

SEQ ID NO: 34296 - RNA, 20 nt, Artificial Sequence
  HTT spacer sequence TTCN PAM
ucuccuaagagcacuuugcc

SEQ ID NO: 34297 - RNA, 20 nt, Artificial Sequence
  HTT spacer sequence TTCN PAM
ucuucuccuaagagcacuuu

SEQ ID NO: 34298 - RNA, 20 nt, Artificial Sequence
  HTT spacer sequence TTCN PAM
gagucauccuccaaggcuuc

SEQ ID NO: 34299 - RNA, 20 nt, Artificial Sequence
  HTT spacer sequence TTCN PAM
cacuaguuagccgcuggugu

SEQ ID NO: 34300 - RNA, 20 nt, Artificial Sequence
  HTT spacer sequence TTCN PAM
cugucugccuuccaccccuu

SEQ ID NO: 34301 - RNA, 20 nt, Artificial Sequence
  HTT spacer sequence TTCN PAM
accccuugcccuuccugcuc

SEQ ID NO: 34302 - RNA, 20 nt, Artificial Sequence
  HTT spacer sequence TTCN PAM
ugcucgucccccugcaccug

SEQ ID NO: 34303 - RNA, 20 nt, Artificial Sequence
  HTT spacer sequence TTCN PAM
ggcuucuuuuauaauacuua

SEQ ID NO: 34304 - RNA, 20 nt, Artificial Sequence
  HTT spacer sequence TTCN PAM
uuuauaauacuuacucugaa

SEQ ID NO: 34305 - RNA, 20 nt, Artificial Sequence
  HTT spacer sequence TTCN PAM
gaguaaguauuauaaaagaa

SEQ ID NO: 34306 - RNA, 20 nt, Artificial Sequence
  HTT spacer sequence TTCN PAM
augguuuaggcuguuuuaaa

SEQ ID NO: 34307 - RNA, 20 nt, Artificial Sequence
  HTT spacer sequence TTCN PAM
accugccauccccuacucac

SEQ ID NO: 34308 - RNA, 20 nt, Artificial Sequence
  HTT spacer sequence TTCN PAM
caacccccagcauaacccau

SEQ ID NO: 34309 - RNA, 20 nt, Artificial Sequence
  HTT spacer sequence TTCN PAM
ucccauuucccaacccccag

SEQ ID NO: 34310 - RNA, 20 nt, Artificial Sequence
  HTT spacer sequence TTCN PAM
ucccauaauuuuucauccca

SEQ ID NO: 34311 - RNA, 20 nt, Artificial Sequence
  HTT spacer sequence TTCN PAM
aguuaaacuauccauaggca

SEQ ID NO: 34312 - RNA, 20 nt, Artificial Sequence
  HTT spacer sequence TTCN PAM
uucaaguuaaacuauccaua

SEQ ID NO: 34313 - RNA, 20 nt, Artificial Sequence
  HTT spacer sequence TTCN PAM
uuuuugagauagagucucac

SEQ ID NO: 34314 - RNA, 20 nt, Artificial Sequence
  HTT spacer sequence TTCN PAM
ggguuccagcgauucuccug

SEQ ID NO: 34315 - RNA, 20 nt, Artificial Sequence
  HTT spacer sequence TTCN PAM
agcgauucuccugccucagc

SEQ ID NO: 34316 - RNA, 20 nt, Artificial Sequence
  HTT spacer sequence TTCN PAM
ccugccucagccucccaagu

SEQ ID NO: 34317 - RNA, 20 nt, Artificial Sequence
  HTT spacer sequence TTCN PAM
agaccagccugaccaacaug

SEQ ID NO: 34318 - RNA, 20 nt, Artificial Sequence
  HTT spacer sequence TTCN PAM
uuagauaaguaucuguaacu

SEQ ID NO: 34319 - RNA, 20 nt, Artificial Sequence
  HTT spacer sequence TTCN PAM
cuguguacuuuauaaaagau

SEQ ID NO: 34320 - RNA, 20 nt, Artificial Sequence
  HTT spacer sequence TTCN PAM
guuaauccucaucuuuuaua

SEQ ID NO: 34321 - RNA, 20 nt, Artificial Sequence
  HTT spacer sequence TTCN PAM
uuuagauaggauuauacaac

SEQ ID NO: 34322 - RNA, 20 nt, Artificial Sequence
  HTT spacer sequence TTCN PAM
guuauagcuaaaauauucuu

SEQ ID NO: 34323 - RNA, 20 nt, Artificial Sequence
  HTT spacer sequence TTCN PAM
ucucuaaauauuuaagucuu

SEQ ID NO: 34324 - RNA, 20 nt, Artificial Sequence
  HTT spacer sequence TTCN PAM
gauuuuccucucuaaauauu

SEQ ID NO: 34325 - RNA, 20 nt, Artificial Sequence
  HTT spacer sequence TTCN PAM
aguaguaauuauuuauuuac

SEQ ID NO: 34326 - RNA, 20 nt, Artificial Sequence
  HTT spacer sequence TTCN PAM
ugucgaccuuuuugccauaa

SEQ ID NO: 34327 - RNA, 20 nt, Artificial Sequence
  HTT spacer sequence TTCN PAM
aaauuaccauuuaaaaacaa

SEQ ID NO: 34328 - RNA, 20 nt, Artificial Sequence
  HTT spacer sequence TTCN PAM
uaguugacuuucuaaauuac

SEQ ID NO: 34329 - RNA, 20 nt, Artificial Sequence
  HTT spacer sequence TTCN PAM
aggagaauaggacuggaguc

SEQ ID NO: 34330 - RNA, 20 nt, Artificial Sequence
  HTT spacer sequence TTCN PAM
ccuggaagauaaaccuguaa

SEQ ID NO: 34331 - RNA, 20 nt, Artificial Sequence
  HTT spacer sequence TTCN PAM
agaucucgacuccaguccua

SEQ ID NO: 34332 - RNA, 20 nt, Artificial Sequence
  HTT spacer sequence TTCN PAM
aagccacauucaagaucucg

SEQ ID NO: 34333 - RNA, 20 nt, Artificial Sequence
  HTT spacer sequence TTCN PAM
uccaagccacauucaagauc

SEQ ID NO: 34334 - RNA, 20 nt, Artificial Sequence
  HTT spacer sequence TTCN PAM
gaccacugcuugcuuagagg

SEQ ID NO: 34335 - RNA, 20 nt, Artificial Sequence
  HTT spacer sequence TTCN PAM
uaaccgacuacuccaagccu

SEQ ID NO: 34336 - RNA, 20 nt, Artificial Sequence
  HTT spacer sequence TTCN PAM
aguucuuaaccgacuacucc

SEQ ID NO: 34337 - RNA, 20 nt, Artificial Sequence
  HTT spacer sequence TTCN PAM
guuuuugcagugaaacagca

SEQ ID NO: 34338 - RNA, 20 nt, Artificial Sequence
  HTT spacer sequence TTCN PAM
cugcaaaaaccgaaguucaa

SEQ ID NO: 34339 - RNA, 20 nt, Artificial Sequence
  HTT spacer sequence TTCN PAM
caaaugcuguuucacugcaa

SEQ ID NO: 34340 - RNA, 20 nt, Artificial Sequence
  HTT spacer sequence TTCN PAM
gauaagccuuauuuuauaag

SEQ ID NO: 34341 - RNA, 20 nt, Artificial Sequence
  HTT spacer sequence TTCN PAM
agcaucucucacacugccuc

SEQ ID NO: 34342 - RNA, 20 nt, Artificial Sequence
  HTT spacer sequence TTCN PAM
gcaucuucaggaugcugugc

SEQ ID NO: 34343 - RNA, 20 nt, Artificial Sequence
  HTT spacer sequence TTCN PAM
ggaugcugugcagcugaaac

SEQ ID NO: 34344 - RNA, 20 nt, Artificial Sequence
  HTT spacer sequence TTCN PAM
gcugcacagcauccugaaga

SEQ ID NO: 34345 - RNA, 20 nt, Artificial Sequence
  HTT spacer sequence TTCN PAM
accguuaucaaauguuucag

SEQ ID NO: 34346 - RNA, 20 nt, Artificial Sequence
  HTT spacer sequence TTCN PAM
uuauuuugcaagccugugau

SEQ ID NO: 34347 - RNA, 20 nt, Artificial Sequence
  HTT spacer sequence TTCN PAM
cuauugaauguuuucucucg

SEQ ID NO: 34348 - RNA, 20 nt, Artificial Sequence
  HTT spacer sequence TTCN PAM
auagggaaucacaggcuugc

SEQ ID NO: 34349 - RNA, 20 nt, Artificial Sequence
  HTT spacer sequence TTCN PAM
cucgccauuugacaaaugag

SEQ ID NO: 34350 - RNA, 20 nt, Artificial Sequence
  HTT spacer sequence TTCN PAM
cugucuucagccucagugaa

SEQ ID NO: 34351 - RNA, 20 nt, Artificial Sequence
  HTT spacer sequence TTCN PAM
gccucagugaaggaugagau

SEQ ID NO: 34352 - RNA, 20 nt, Artificial Sequence
  HTT spacer sequence TTCN PAM
cugaggcugaagacagagaa

SEQ ID NO: 34353 - RNA, 20 nt, Artificial Sequence
  HTT spacer sequence TTCN PAM
ucagggguuuccacuccagg

SEQ ID NO: 34354 - RNA, 20 nt, Artificial Sequence
  HTT spacer sequence TTCN PAM
gggguuuccacuccaggguc

SEQ ID NO: 34355 - RNA, 20 nt, Artificial Sequence
  HTT spacer sequence TTCN PAM
acuccagggucagcagguca

SEQ ID NO: 34356 - RNA, 20 nt, Artificial Sequence
  HTT spacer sequence TTCN PAM
gugaugaugucaugaccugc

SEQ ID NO: 34357 - RNA, 20 nt, Artificial Sequence
  HTT spacer sequence TTCN PAM
gguccauggcagggucagau

SEQ ID NO: 34358 - RNA, 20 nt, Artificial Sequence
  HTT spacer sequence TTCN PAM
gugguggucugggagcuguc

SEQ ID NO: 34359 - RNA, 20 nt, Artificial Sequence
  HTT spacer sequence TTCN PAM
gcuguuaccccuucagacag

SEQ ID NO: 34360 - RNA, 20 nt, Artificial Sequence
  HTT spacer sequence TTCN PAM
gacaguucugaaauuguaag

SEQ ID NO: 34361 - RNA, 20 nt, Artificial Sequence
  HTT spacer sequence TTCN PAM
gaaauuguaagugggcagag

SEQ ID NO: 34362 - RNA, 20 nt, Artificial Sequence
  HTT spacer sequence TTCN PAM
gaacugucugaagggguaac

SEQ ID NO: 34363 - RNA, 20 nt, Artificial Sequence
  HTT spacer sequence TTCN PAM
agaccagccuggccaacaug

SEQ ID NO: 34364 - RNA, 20 nt, Artificial Sequence
  HTT spacer sequence TTCN PAM
ccauguuggccaggcugguc

SEQ ID NO: 34365 - RNA, 20 nt, Artificial Sequence
  HTT spacer sequence TTCN PAM
ccugccucagccucccuaac

SEQ ID NO: 34366 - RNA, 20 nt, Artificial Sequence
  HTT spacer sequence TTCN PAM
aaaaaaauaaaaaaauaaag

SEQ ID NO: 34367 - RNA, 20 nt, Artificial Sequence
  HTT spacer sequence TTCN PAM
cagcccacugcaacuucugc

SEQ ID NO: 34368 - RNA, 20 nt, Artificial Sequence
  HTT spacer sequence TTCN PAM
gccucccaggcucgagcgau

SEQ ID NO: 34369 - RNA, 20 nt, Artificial Sequence
  HTT spacer sequence TTCN PAM
cccgccucagccuccugagu

SEQ ID NO: 34370 - RNA, 20 nt, Artificial Sequence
  HTT spacer sequence TTCN PAM
guagagacaggguuucacca

SEQ ID NO: 34371 - RNA, 20 nt, Artificial Sequence
  HTT spacer sequence TTCN PAM
ccauguuggccaggcugguc

SEQ ID NO: 34372 - RNA, 20 nt, Artificial Sequence
  HTT spacer sequence TTCN PAM
ucccuggagaccuagaccug

SEQ ID NO: 34373 - RNA, 20 nt, Artificial Sequence
  HTT spacer sequence TTCN PAM
cuggagaccuagaccugaac

SEQ ID NO: 34374 - RNA, 20 nt, Artificial Sequence
  HTT spacer sequence TTCN PAM
ggucuaggucuccagggaag

SEQ ID NO: 34375 - RNA, 20 nt, Artificial Sequence
  HTT spacer sequence TTCN PAM
cuuguuaucuaauaccccua

SEQ ID NO: 34376 - RNA, 20 nt, Artificial Sequence
  HTT spacer sequence TTCN PAM
cugaaggaaacaacuuagug

SEQ ID NO: 34377 - RNA, 20 nt, Artificial Sequence
  HTT spacer sequence TTCN PAM
gugaagguaucagaugaggu

SEQ ID NO: 34378 - RNA, 20 nt, Artificial Sequence
  HTT spacer sequence TTCN PAM
uucagugaagguaucagaug

SEQ ID NO: 34379 - RNA, 20 nt, Artificial Sequence
  HTT spacer sequence TTCN PAM
acacaaaagacacuaaguug

SEQ ID NO: 34380 - RNA, 20 nt, Artificial Sequence
  HTT spacer sequence TTCN PAM
aauuuuuuaccucaguguuc

SEQ ID NO: 34381 - RNA, 20 nt, Artificial Sequence
  HTT spacer sequence TTCN PAM
uauaaucaacuauuccaauu

SEQ ID NO: 34382 - RNA, 20 nt, Artificial Sequence
  HTT spacer sequence TTCN PAM
uuaagaccacagaucuguuu

SEQ ID NO: 34383 - RNA, 20 nt, Artificial Sequence
  HTT spacer sequence TTCN PAM
uaaaauaaugcacaguauua

SEQ ID NO: 34384 - RNA, 20 nt, Artificial Sequence
  HTT spacer sequence TTCN PAM
aaaaacuuuuacaacauuuc

SEQ ID NO: 34385 - RNA, 20 nt, Artificial Sequence
  HTT spacer sequence TTCN PAM
cauuugauagcggcauaggu

SEQ ID NO: 34386 - RNA, 20 nt, Artificial Sequence
  HTT spacer sequence TTCN PAM
caucucuaaguuaguggaca

SEQ ID NO: 34387 - RNA, 20 nt, Artificial Sequence
  HTT spacer sequence TTCN PAM
guuuuaaaaacugugguuaa

SEQ ID NO: 34388 - RNA, 20 nt, Artificial Sequence
  HTT spacer sequence TTCN PAM
uaaccauuuuuugcguauac

SEQ ID NO: 34389 - RNA, 20 nt, Artificial Sequence
  HTT spacer sequence TTCN PAM
cugguauuaaauacauuuaa

SEQ ID NO: 34390 - RNA, 20 nt, Artificial Sequence
  HTT spacer sequence TTCN PAM
augacauuauuuaaauguau

SEQ ID NO: 34391 - RNA, 20 nt, Artificial Sequence
  HTT spacer sequence TTCN PAM
guguuacaugaucaaaaggu

SEQ ID NO: 34392 - RNA, 20 nt, Artificial Sequence
  HTT spacer sequence TTCN PAM
cauugaacucuauuccuccu

SEQ ID NO: 34393 - RNA, 20 nt, Artificial Sequence
  HTT spacer sequence TTCN PAM
augggaacagagcuucagug

SEQ ID NO: 34394 - RNA, 20 nt, Artificial Sequence
  HTT spacer sequence TTCN PAM
uccuuucccgccaagucccu

SEQ ID NO: 34395 - RNA, 20 nt, Artificial Sequence
  HTT spacer sequence TTCN PAM
cgccaagucccuggcaacca

SEQ ID NO: 34396 - RNA, 20 nt, Artificial Sequence
  HTT spacer sequence TTCN PAM
ucuuucugucuucugaauuu

SEQ ID NO: 34397 - RNA, 20 nt, Artificial Sequence
  HTT spacer sequence TTCN PAM
uucugucuucugaauuugac

SEQ ID NO: 34398 - RNA, 20 nt, Artificial Sequence
  HTT spacer sequence TTCN PAM
gucuucugaauuugacuacu

SEQ ID NO: 34399 - RNA, 20 nt, Artificial Sequence
  HTT spacer sequence TTCN PAM
gaauuugacuacuuuggguu

SEQ ID NO: 34400 - RNA, 20 nt, Artificial Sequence
  HTT spacer sequence TTCN PAM
gaagacagaaagaagaaucg

SEQ ID NO: 34401 - RNA, 20 nt, Artificial Sequence
  HTT spacer sequence TTCN PAM
cauauacuuuaggagucaca

SEQ ID NO: 34402 - RNA, 20 nt, Artificial Sequence
  HTT spacer sequence TTCN PAM
aacauaggcuacaacaugca

SEQ ID NO: 34403 - RNA, 20 nt, Artificial Sequence
  HTT spacer sequence TTCN PAM
uaauguuucaggccaaauac

SEQ ID NO: 34404 - RNA, 20 nt, Artificial Sequence
  HTT spacer sequence TTCN PAM
ggccaaauacuauuccauug

SEQ ID NO: 34405 - RNA, 20 nt, Artificial Sequence
  HTT spacer sequence TTCN PAM
auuguauggauaggccacau

SEQ ID NO: 34406 - RNA, 20 nt, Artificial Sequence
  HTT spacer sequence TTCN PAM
auuccucuguccauggacac

SEQ ID NO: 34407 - RNA, 20 nt, Artificial Sequence
  HTT spacer sequence TTCN PAM
ucuguccauggacacuugua

SEQ ID NO: 34408 - RNA, 20 nt, Artificial Sequence
  HTT spacer sequence TTCN PAM
uguuuuagccauugugaauc

SEQ ID NO: 34409 - RNA, 20 nt, Artificial Sequence
  HTT spacer sequence TTCN PAM
caauggcuaaaacaugaagc

SEQ ID NO: 34410 - RNA, 20 nt, Artificial Sequence
  HTT spacer sequence TTCN PAM
uaacagcaugauucacaaug

SEQ ID NO: 34411 - RNA, 20 nt, Artificial Sequence
  HTT spacer sequence TTCN PAM
auuuuuuuggcuaaauaccc

SEQ ID NO: 34412 - RNA, 20 nt, Artificial Sequence
  HTT spacer sequence TTCN PAM
ggguauuuagccaaaaaaau

SEQ ID NO: 34413 - RNA, 20 nt, Artificial Sequence
  HTT spacer sequence TTCN PAM
aauuuuaauuuaaaacauuc

SEQ ID NO: 34414 - RNA, 20 nt, Artificial Sequence
  HTT spacer sequence TTCN PAM
uaucauugaguguuuuacuu

SEQ ID NO: 34415 - RNA, 20 nt, Artificial Sequence
  HTT spacer sequence TTCN PAM
guuuuuuuagguaaauuaca

SEQ ID NO: 34416 - RNA, 20 nt, Artificial Sequence
  HTT spacer sequence TTCN PAM
aguggacaugaaacaucuug

SEQ ID NO: 34417 - RNA, 20 nt, Artificial Sequence
  HTT spacer sequence TTCN PAM
uguccacuugaaauguccug

SEQ ID NO: 34418 - RNA, 20 nt, Artificial Sequence
  HTT spacer sequence TTCN PAM
acaucacaagauguuucaug

SEQ ID NO: 34419 - RNA, 20 nt, Artificial Sequence
  HTT spacer sequence TTCN PAM
uauguuuagccaucagcuug

SEQ ID NO: 34420 - RNA, 20 nt, Artificial Sequence
  HTT spacer sequence TTCN PAM
acaaaaaccuaacaauauaa

SEQ ID NO: 34421 - RNA, 20 nt, Artificial Sequence
  HTT spacer sequence TTCN PAM
aacuugcuguaaaauuuguu

SEQ ID NO: 34422 - RNA, 20 nt, Artificial Sequence
  HTT spacer sequence TTCN PAM
caaacaaauuuuacagcaag

SEQ ID NO: 34423 - RNA, 20 nt, Artificial Sequence
  HTT spacer sequence TTCN PAM
uuuucauauuaaaaagaaau

SEQ ID NO: 34424 - RNA, 20 nt, Artificial Sequence
  HTT spacer sequence TTCN PAM
uauuaaaaagaaauguccac

SEQ ID NO: 34425 - RNA, 20 nt, Artificial Sequence
  HTT spacer sequence TTCN PAM
uuuuaauaugaaaaagaaaa

SEQ ID NO: 34426 - RNA, 20 nt, Artificial Sequence
  HTT spacer sequence TTCN PAM
aauguggacauuucuuuuua

SEQ ID NO: 34427 - RNA, 20 nt, Artificial Sequence
  HTT spacer sequence TTCN PAM
uaauguagugggaaugagug

SEQ ID NO: 34428 - RNA, 20 nt, Artificial Sequence
  HTT spacer sequence TTCN PAM
cacuacauuaugaaaagcuc

SEQ ID NO: 34429 - RNA, 20 nt, Artificial Sequence
  HTT spacer sequence TTCN PAM
augcgugcauuucugugccu

SEQ ID NO: 34430 - RNA, 20 nt, Artificial Sequence
  HTT spacer sequence TTCN PAM
gugccuugaaauaaaugaca

SEQ ID NO: 34431 - RNA, 20 nt, Artificial Sequence
  HTT spacer sequence TTCN PAM
aggcacagaaaugcacgcau

SEQ ID NO: 34432 - RNA, 20 nt, Artificial Sequence
  HTT spacer sequence TTCN PAM
guguguaaaaugugcucuuu

SEQ ID NO: 34433 - RNA, 20 nt, Artificial Sequence
  HTT spacer sequence TTCN PAM
ucauugcacuuccauguugg

SEQ ID NO: 34434 - RNA, 20 nt, Artificial Sequence
  HTT spacer sequence TTCN PAM
auguuggagggcuugucucu

SEQ ID NO: 34435 - RNA, 20 nt, Artificial Sequence
  HTT spacer sequence TTCN PAM
aaauucucacagccccccuu

SEQ ID NO: 34436 - RNA, 20 nt, Artificial Sequence
  HTT spacer sequence TTCN PAM
cacagccccccuugaaccgu

SEQ ID NO: 34437 - RNA, 20 nt, Artificial Sequence
  HTT spacer sequence TTCN PAM
aggggggcugugagaauuuu

SEQ ID NO: 34438 - RNA, 20 nt, Artificial Sequence
  HTT spacer sequence TTCN PAM
uccuggggcuguccaaucug

SEQ ID NO: 34439 - RNA, 20 nt, Artificial Sequence
  HTT spacer sequence TTCN PAM
ucaucuucauccuggggcug

SEQ ID NO: 34440 - RNA, 20 nt, Artificial Sequence
  HTT spacer sequence TTCN PAM
uccugaugaagccucggagg

SEQ ID NO: 34441 - RNA, 20 nt, Artificial Sequence
  HTT spacer sequence TTCN PAM
ugaugaagccucggaggccu

SEQ ID NO: 34442 - RNA, 20 nt, Artificial Sequence
  HTT spacer sequence TTCN PAM
ucaggaagaauaccuguggc

SEQ ID NO: 34443 - RNA, 20 nt, Artificial Sequence
  HTT spacer sequence TTCN PAM
ggaacucuuccauggguaug

SEQ ID NO: 34444 - RNA, 20 nt, Artificial Sequence
  HTT spacer sequence TTCN PAM
ugaaggccuccgaggcuuca

SEQ ID NO: 34445 - RNA, 20 nt, Artificial Sequence
  HTT spacer sequence TTCN PAM
auggguauguggacuacagg

SEQ ID NO: 34446 - RNA, 20 nt, Artificial Sequence
  HTT spacer sequence TTCN PAM
gaccuggacaucuuaauuau

SEQ ID NO: 34447 - RNA, 20 nt, Artificial Sequence
  HTT spacer sequence TTCN PAM
aagaagaaguccuuugauac

SEQ ID NO: 34448 - RNA, 20 nt, Artificial Sequence
  HTT spacer sequence TTCN PAM
uggaagcaaagauauaauua

SEQ ID NO: 34449 - RNA, 20 nt, Artificial Sequence
  HTT spacer sequence TTCN PAM
ucuuggaagcaaagauauaa

SEQ ID NO: 34450 - RNA, 20 nt, Artificial Sequence
  HTT spacer sequence TTCN PAM
gaguucugaauagcugauga

SEQ ID NO: 34451 - RNA, 20 nt, Artificial Sequence
  HTT spacer sequence TTCN PAM
gaauagcugaugaaaaugac

SEQ ID NO: 34452 - RNA, 20 nt, Artificial Sequence
  HTT spacer sequence TTCN PAM
gaacucagaaaacaguauca

SEQ ID NO: 34453 - RNA, 20 nt, Artificial Sequence
  HTT spacer sequence TTCN PAM
ucagcuauucagaacucaga

SEQ ID NO: 34454 - RNA, 20 nt, Artificial Sequence
  HTT spacer sequence TTCN PAM
ucaauuggucauuuucauca

SEQ ID NO: 34455 - RNA, 20 nt, Artificial Sequence
  HTT spacer sequence TTCN PAM
ugaucuaaaucuuauacuuu

SEQ ID NO: 34456 - RNA, 20 nt, Artificial Sequence
  HTT spacer sequence TTCN PAM
acuuaaaauacaauuauaca

SEQ ID NO: 34457 - RNA, 20 nt, Artificial Sequence
  HTT spacer sequence TTCN PAM
cuguuuuuaaagcccuucaa

SEQ ID NO: 34458 - RNA, 20 nt, Artificial Sequence
  HTT spacer sequence TTCN PAM
acaggcacauuuauugaaaa

SEQ ID NO: 34459 - RNA, 20 nt, Artificial Sequence
  HTT spacer sequence TTCN PAM
auaaaugugccuguugaagg

SEQ ID NO: 34460 - RNA, 20 nt, Artificial Sequence
  HTT spacer sequence TTCN PAM
gacagcaguguugauaaauu

SEQ ID NO: 34461 - RNA, 20 nt, Artificial Sequence
  HTT spacer sequence TTCN PAM
ucucucaacacaaauuuauc

SEQ ID NO: 34462 - RNA, 20 nt, Artificial Sequence
  HTT spacer sequence TTCN PAM
guagcuucaucucucaacac

SEQ ID NO: 34463 - RNA, 20 nt, Artificial Sequence
  HTT spacer sequence TTCN PAM
ugaucacccgguucaguagc

SEQ ID NO: 34464 - RNA, 20 nt, Artificial Sequence
  HTT spacer sequence TTCN PAM
gagcuugugugaggauuuaa

SEQ ID NO: 34465 - RNA, 20 nt, Artificial Sequence
  HTT spacer sequence TTCN PAM
caucccugggccuuuaaauu

SEQ ID NO: 34466 - RNA, 20 nt, Artificial Sequence
  HTT spacer sequence TTCN PAM
ccuuuaaauaccagcucuuc

SEQ ID NO: 34467 - RNA, 20 nt, Artificial Sequence
  HTT spacer sequence TTCN PAM
caggccuguuguuuucugcc

SEQ ID NO: 34468 - RNA, 20 nt, Artificial Sequence
  HTT spacer sequence TTCN PAM
gccuuuccagguacuaccca

SEQ ID NO: 34469 - RNA, 20 nt, Artificial Sequence
  HTT spacer sequence TTCN PAM
agguacuacccacagccuug

SEQ ID NO: 34470 - RNA, 20 nt, Artificial Sequence
  HTT spacer sequence TTCN PAM
caaggcuguggguaguaccu

SEQ ID NO: 34471 - RNA, 20 nt, Artificial Sequence
  HTT spacer sequence TTCN PAM
gccuccuuugagagugugcc

SEQ ID NO: 34472 - RNA, 20 nt, Artificial Sequence
  HTT spacer sequence TTCN PAM
guacugaauguuuccuuguc

SEQ ID NO: 34473 - RNA, 20 nt, Artificial Sequence
  HTT spacer sequence TTCN PAM
guacagaauagauuugucug

SEQ ID NO: 34474 - RNA, 20 nt, Artificial Sequence
  HTT spacer sequence TTCN PAM
uugucugauuucuuggauca

SEQ ID NO: 34475 - RNA, 20 nt, Artificial Sequence
  HTT spacer sequence TTCN PAM
uggaucauucauuugauggu

SEQ ID NO: 34476 - RNA, 20 nt, Artificial Sequence
  HTT spacer sequence TTCN PAM
uuugaugguugcguauggcc

SEQ ID NO: 34477 - RNA, 20 nt, Artificial Sequence
  HTT spacer sequence TTCN PAM
uguuuugguucuacugaacu

SEQ ID NO: 34478 - RNA, 20 nt, Artificial Sequence
  HTT spacer sequence TTCN PAM
acugaacuguucuaaaaguc

SEQ ID NO: 34479 - RNA, 20 nt, Artificial Sequence
  HTT spacer sequence TTCN PAM
guagaaccaaaacaagaaac

SEQ ID NO: 34480 - RNA, 20 nt, Artificial Sequence
  HTT spacer sequence TTCN PAM
aaaagucucucuucauauua

SEQ ID NO: 34481 - RNA, 20 nt, Artificial Sequence
  HTT spacer sequence TTCN PAM
uauuaucuuuuuacauguaa

SEQ ID NO: 34482 - RNA, 20 nt, Artificial Sequence
  HTT spacer sequence TTCN PAM
cuuuuaauuccucaaggaca

SEQ ID NO: 34483 - RNA, 20 nt, Artificial Sequence
  HTT spacer sequence TTCN PAM
ucaaggacaaggaauagcgu

SEQ ID NO: 34484 - RNA, 20 nt, Artificial Sequence
  HTT spacer sequence TTCN PAM
uuguccuugaggaauuaaaa

SEQ ID NO: 34485 - RNA, 20 nt, Artificial Sequence
  HTT spacer sequence TTCN PAM
caguucgucccaucaaucag

SEQ ID NO: 34486 - RNA, 20 nt, Artificial Sequence
  HTT spacer sequence TTCN PAM
ucccaucaaucagaauuaua

SEQ ID NO: 34487 - RNA, 20 nt, Artificial Sequence
  HTT spacer sequence TTCN PAM
gauugaugggacgaacugug

SEQ ID NO: 34488 - RNA, 20 nt, Artificial Sequence
  HTT spacer sequence TTCN PAM
ucuuagauuugggcuucccc

SEQ ID NO: 34489 - RNA, 20 nt, Artificial Sequence
  HTT spacer sequence TTCN PAM
ccaggcuguugccuuucccc

SEQ ID NO: 34490 - RNA, 20 nt, Artificial Sequence
  HTT spacer sequence TTCN PAM
ccaaguagcuucugcuuguc

SEQ ID NO: 34491 - RNA, 20 nt, Artificial Sequence
  HTT spacer sequence TTCN PAM
gcuuguccuguagaagaccu

SEQ ID NO: 34492 - RNA, 20 nt, Artificial Sequence
  HTT spacer sequence TTCN PAM
acaggacaagcagaagcuac

SEQ ID NO: 34493 - RNA, 20 nt, Artificial Sequence
  HTT spacer sequence TTCN PAM
ugcuuugcuucugcagcagc

SEQ ID NO: 34494 - RNA, 20 nt, Artificial Sequence
  HTT spacer sequence TTCN PAM
gcagcagccguuccugaaug

SEQ ID NO: 34495 - RNA, 20 nt, Artificial Sequence
  HTT spacer sequence TTCN PAM
ugaaugccuagugucaacug

SEQ ID NO: 34496 - RNA, 20 nt, Artificial Sequence
  HTT spacer sequence TTCN PAM
ggaacggcugcugcagaagc

SEQ ID NO: 34497 - RNA, 20 nt, Artificial Sequence
  HTT spacer sequence TTCN PAM
uaccacgcccacccucccug

SEQ ID NO: 34498 - RNA, 20 nt, Artificial Sequence
  HTT spacer sequence TTCN PAM
gcuuggccauggucucugug

SEQ ID NO: 34499 - RNA, 20 nt, Artificial Sequence
  HTT spacer sequence TTCN PAM
agagcagcacuuaagccagg

SEQ ID NO: 34500 - RNA, 20 nt, Artificial Sequence
  HTT spacer sequence TTCN PAM
acagauaguuccagagcagc

SEQ ID NO: 34501 - RNA, 20 nt, Artificial Sequence
  HTT spacer sequence TTCN PAM
uucaacagauaguuccagag

SEQ ID NO: 34502 - RNA, 20 nt, Artificial Sequence
  HTT spacer sequence TTCN PAM
ugcauuaguucauucaacag

SEQ ID NO: 34503 - RNA, 20 nt, Artificial Sequence
  HTT spacer sequence TTCN PAM
agccuugccgcaucaaaggu

SEQ ID NO: 34504 - RNA, 20 nt, Artificial Sequence
  HTT spacer sequence TTCN PAM
uuuuugcuaacagggggaaa

SEQ ID NO: 34505 - RNA, 20 nt, Artificial Sequence
  HTT spacer sequence TTCN PAM
cccuguuagcaaaaacgaag

SEQ ID NO: 34506 - RNA, 20 nt, Artificial Sequence
  HTT spacer sequence TTCN PAM
acugugcacauccccuuuug

SEQ ID NO: 34507 - RNA, 20 nt, Artificial Sequence
  HTT spacer sequence TTCN PAM
uucaacugugcacauccccu

SEQ ID NO: 34508 - RNA, 20 nt, Artificial Sequence
  HTT spacer sequence TTCN PAM
gaggucagcuugguggccug

SEQ ID NO: 34509 - RNA, 20 nt, Artificial Sequence
  HTT spacer sequence TTCN PAM
ucugcugcacgcaaggcaaa

SEQ ID NO: 34510 - RNA, 20 nt, Artificial Sequence
  HTT spacer sequence TTCN PAM
acuuccucugcugcacgcaa

SEQ ID NO: 34511 - RNA, 20 nt, Artificial Sequence
  HTT spacer sequence TTCN PAM
cuagccgaggggagggagga

SEQ ID NO: 34512 - RNA, 20 nt, Artificial Sequence
  HTT spacer sequence TTCN PAM
ucccuccccucggcuaguga

SEQ ID NO: 34513 - RNA, 20 nt, Artificial Sequence
  HTT spacer sequence TTCN PAM
uuugaaaacaaucuguuguu

SEQ ID NO: 34514 - RNA, 20 nt, Artificial Sequence
  HTT spacer sequence TTCN PAM
aaugaacaaaaccagaccca

SEQ ID NO: 34515 - RNA, 20 nt, Artificial Sequence
  HTT spacer sequence TTCN PAM
gccucaaacaacagauuguu

SEQ ID NO: 34516 - RNA, 20 nt, Artificial Sequence
  HTT spacer sequence TTCN PAM
uggcagugcugguuccggac

SEQ ID NO: 34517 - RNA, 20 nt, Artificial Sequence
  HTT spacer sequence TTCN PAM
ggacagggaugugaggguca

SEQ ID NO: 34518 - RNA, 20 nt, Artificial Sequence
  HTT spacer sequence TTCN PAM
cgcugacccucacaucccug

SEQ ID NO: 34519 - RNA, 20 nt, Artificial Sequence
  HTT spacer sequence TTCN PAM
ggguggagggccacagcugc

SEQ ID NO: 34520 - RNA, 20 nt, Artificial Sequence
  HTT spacer sequence TTCN PAM
ucagcaaacucuauaaaguu

SEQ ID NO: 34521 - RNA, 20 nt, Artificial Sequence
  HTT spacer sequence TTCN PAM
gcaaacucuauaaaguuccu

SEQ ID NO: 34522 - RNA, 20 nt, Artificial Sequence
  HTT spacer sequence TTCN PAM
ucuugacaccacggaauacc

SEQ ID NO: 34523 - RNA, 20 nt, Artificial Sequence
  HTT spacer sequence TTCN PAM
guggugucaagaggaacuuu

SEQ ID NO: 34524 - RNA, 20 nt, Artificial Sequence
  HTT spacer sequence TTCN PAM
caucuuauuuucucagauuu

SEQ ID NO: 34525 - RNA, 20 nt, Artificial Sequence
  HTT spacer sequence TTCN PAM
cagauuuaaucauuauugua

SEQ ID NO: 34526 - RNA, 20 nt, Artificial Sequence
  HTT spacer sequence TTCN PAM
guauugacuauuuuaguuuu

SEQ ID NO: 34527 - RNA, 20 nt, Artificial Sequence
  HTT spacer sequence TTCN PAM
uuugggauauuugaccugcg

SEQ ID NO: 34528 - RNA, 20 nt, Artificial Sequence
  HTT spacer sequence TTCN PAM
gaaaacacaugaauagugaa

SEQ ID NO: 34529 - RNA, 20 nt, Artificial Sequence
  HTT spacer sequence TTCN PAM
gaagagcuacaacgcagguc

SEQ ID NO: 34530 - RNA, 20 nt, Artificial Sequence
  HTT spacer sequence TTCN PAM
uguguuuucugaagagcuac

SEQ ID NO: 34531 - RNA, 20 nt, Artificial Sequence
  HTT spacer sequence TTCN PAM
cuauucauguguuuucugaa

SEQ ID NO: 34532 - RNA, 20 nt, Artificial Sequence
  HTT spacer sequence TTCN PAM
uuguuucauggguucccuuu

SEQ ID NO: 34533 - RNA, 20 nt, Artificial Sequence
  HTT spacer sequence TTCN PAM
uggguucccuuuagaugaaa

SEQ ID NO: 34534 - RNA, 20 nt, Artificial Sequence
  HTT spacer sequence TTCN PAM
cuuuagaugaaacccauaga

SEQ ID NO: 34535 - RNA, 20 nt, Artificial Sequence
  HTT spacer sequence TTCN PAM
ucuaaagggaacccaugaaa

SEQ ID NO: 34536 - RNA, 20 nt, Artificial Sequence
  HTT spacer sequence TTCN PAM
ccucuauggguuucaucuaa

SEQ ID NO: 34537 - RNA, 20 nt, Artificial Sequence
  HTT spacer sequence TTCN PAM
acuuuucuccucuauggguu

SEQ ID NO: 34538 - RNA, 20 nt, Artificial Sequence
  HTT spacer sequence TTCN PAM
cacucagggugagugggaac

SEQ ID NO: 34539 - RNA, 20 nt, Artificial Sequence
  HTT spacer sequence TTCN PAM
cacucacccugagugugaau

SEQ ID NO: 34540 - RNA, 20 nt, Artificial Sequence
  HTT spacer sequence TTCN PAM
cguucucucuuuuucuuugg

SEQ ID NO: 34541 - RNA, 20 nt, Artificial Sequence
  HTT spacer sequence TTCN PAM
cucuuuuucuuugggugaga

SEQ ID NO: 34542 - RNA, 20 nt, Artificial Sequence
  HTT spacer sequence TTCN PAM
uugggugagaggguacacuu

SEQ ID NO: 34543 - RNA, 20 nt, Artificial Sequence
  HTT spacer sequence TTCN PAM
aaaacacaaguguacccucu

SEQ ID NO: 34544 - RNA, 20 nt, Artificial Sequence
  HTT spacer sequence TTCN PAM
aaucuuuuuuaaguggaauc

SEQ ID NO: 34545 - RNA, 20 nt, Artificial Sequence
  HTT spacer sequence TTCN PAM
acuuaaaaaagauuagaaaa

SEQ ID NO: 34546 - RNA, 20 nt, Artificial Sequence
  HTT spacer sequence TTCN PAM
agauuccacuuaaaaaagau

SEQ ID NO: 34547 - RNA, 20 nt, Artificial Sequence
  HTT spacer sequence TTCN PAM
agguugucagauaauaaauc

SEQ ID NO: 34548 - RNA, 20 nt, Artificial Sequence
  HTT spacer sequence TTCN PAM
ggauuauaauucuagguugu

SEQ ID NO: 34549 - RNA, 20 nt, Artificial Sequence
  HTT spacer sequence TTCN PAM
ucauauugccaauauguccu

SEQ ID NO: 34550 - RNA, 20 nt, Artificial Sequence
  HTT spacer sequence TTCN PAM
uaaauccugaaacuuuuuuu

SEQ ID NO: 34551 - RNA, 20 nt, Artificial Sequence
  HTT spacer sequence TTCN PAM
ggauuuaagaauuagagauu

SEQ ID NO: 34552 - RNA, 20 nt, Artificial Sequence
  HTT spacer sequence TTCN PAM
cuauaauaacccuaagugau

SEQ ID NO: 34553 - RNA, 20 nt, Artificial Sequence
  HTT spacer sequence TTCN PAM
gaauuuggaucuucucuuca

SEQ ID NO: 34554 - RNA, 20 nt, Artificial Sequence
  HTT spacer sequence TTCN PAM
gaaaugacuucacuauaaua

SEQ ID NO: 34555 - RNA, 20 nt, Artificial Sequence
  HTT spacer sequence TTCN PAM
cuucacaccucuuuuucucu

SEQ ID NO: 34556 - RNA, 20 nt, Artificial Sequence
  HTT spacer sequence TTCN PAM
caccucuuuuucucuuuccu

SEQ ID NO: 34557 - RNA, 20 nt, Artificial Sequence
  HTT spacer sequence TTCN PAM
cuuuccugagaauuaagcuu

SEQ ID NO: 34558 - RNA, 20 nt, Artificial Sequence
  HTT spacer sequence TTCN PAM
ugagaauuaagcuuuuguuu

SEQ ID NO: 34559 - RNA, 20 nt, Artificial Sequence
  HTT spacer sequence TTCN PAM
caggaaagagaaaaagaggu

SEQ ID NO: 34560 - RNA, 20 nt, Artificial Sequence
  HTT spacer sequence TTCN PAM
aguuagaaaguugauaguag

SEQ ID NO: 34561 - RNA, 20 nt, Artificial Sequence
  HTT spacer sequence TTCN PAM
aacucgaaacaaaagcuuaa

SEQ ID NO: 34562 - RNA, 20 nt, Artificial Sequence
  HTT spacer sequence TTCN PAM
cuacuaucaacuuucuaacu

SEQ ID NO: 34563 - RNA, 20 nt, Artificial Sequence
  HTT spacer sequence TTCN PAM
auggcugagcaauuuaucuc

SEQ ID NO: 34564 - RNA, 20 nt, Artificial Sequence
  HTT spacer sequence TTCN PAM
ucuguggagauaaauugcuc

SEQ ID NO: 34565 - RNA, 20 nt, Artificial Sequence
  HTT spacer sequence TTCN PAM
agaugucugagacauacugu

SEQ ID NO: 34566 - RNA, 20 nt, Artificial Sequence
  HTT spacer sequence TTCN PAM
aggagccacugccauucucu

SEQ ID NO: 34567 - RNA, 20 nt, Artificial Sequence
  HTT spacer sequence TTCN PAM
cugugggacccucaucugcu

SEQ ID NO: 34568 - RNA, 20 nt, Artificial Sequence
  HTT spacer sequence TTCN PAM
acgugggagauuggaugggc

SEQ ID NO: 34569 - RNA, 20 nt, Artificial Sequence
  HTT spacer sequence TTCN PAM
aauggugcccauccaaucuc

SEQ ID NO: 34570 - RNA, 20 nt, Artificial Sequence
  HTT spacer sequence TTCN PAM
gcuguguuuuuucuaguuau

SEQ ID NO: 34571 - RNA, 20 nt, Artificial Sequence
  HTT spacer sequence TTCN PAM
aguuaugcuuacuaagguuu

SEQ ID NO: 34572 - RNA, 20 nt, Artificial Sequence
  HTT spacer sequence TTCN PAM
ucugguuaggaaauacauuu

SEQ ID NO: 34573 - RNA, 20 nt, Artificial Sequence
  HTT spacer sequence TTCN PAM
gguuaggaaauacauuuucu

SEQ ID NO: 34574 - RNA, 20 nt, Artificial Sequence
  HTT spacer sequence TTCN PAM
uaaccagaagaacaagcaac

SEQ ID NO: 34575 - RNA, 20 nt, Artificial Sequence
  HTT spacer sequence TTCN PAM
uuggcggauugcauuccuuu

SEQ ID NO: 34576 - RNA, 20 nt, Artificial Sequence
  HTT spacer sequence TTCN PAM
uuugcugcggaaaacacuga

SEQ ID NO: 34577 - RNA, 20 nt, Artificial Sequence
  HTT spacer sequence TTCN PAM
gcagcaaaggaaugcaaucc

SEQ ID NO: 34578 - RNA, 20 nt, Artificial Sequence
  HTT spacer sequence TTCN PAM
guguuuuccgcagcaaagga

SEQ ID NO: 34579 - RNA, 20 nt, Artificial Sequence
  HTT spacer sequence TTCN PAM
guuacuugcaaguuagcuug

SEQ ID NO: 34580 - RNA, 20 nt, Artificial Sequence
  HTT spacer sequence TTCN PAM
guggaaccauuucuucacuu

SEQ ID NO: 34581 - RNA, 20 nt, Artificial Sequence
  HTT spacer sequence TTCN PAM
acagaagauuaugcucaccc

SEQ ID NO: 34582 - RNA, 20 nt, Artificial Sequence
  HTT spacer sequence TTCN PAM
ucacuuaguggacauuuuau

SEQ ID NO: 34583 - RNA, 20 nt, Artificial Sequence
  HTT spacer sequence TTCN PAM
cuuaguggacauuuuaucau

SEQ ID NO: 34584 - RNA, 20 nt, Artificial Sequence
  HTT spacer sequence TTCN PAM
uauuaagcuccaauuuuaau

SEQ ID NO: 34585 - RNA, 20 nt, Artificial Sequence
  HTT spacer sequence TTCN PAM
augcacucuaaagcuguaac

SEQ ID NO: 34586 - RNA, 20 nt, Artificial Sequence
  HTT spacer sequence TTCN PAM
aaagcugagagauggauaca

SEQ ID NO: 34587 - RNA, 20 nt, Artificial Sequence
  HTT spacer sequence TTCN PAM
uucuaaagcugagagaugga

SEQ ID NO: 34588 - RNA, 20 nt, Artificial Sequence
  HTT spacer sequence TTCN PAM
uaaacuucaguuuaaguucu

SEQ ID NO: 34589 - RNA, 20 nt, Artificial Sequence
  HTT spacer sequence TTCN PAM
guuuaaguucuaauucucag

SEQ ID NO: 34590 - RNA, 20 nt, Artificial Sequence
  HTT spacer sequence TTCN PAM
aauucucagaauauuuguuu

SEQ ID NO: 34591 - RNA, 20 nt, Artificial Sequence
  HTT spacer sequence TTCN PAM
cagaauauuuguuugaaaua

SEQ ID NO: 34592 - RNA, 20 nt, Artificial Sequence
  HTT spacer sequence TTCN PAM
gagaauuagaacuuaaacug

SEQ ID NO: 34593 - RNA, 20 nt, Artificial Sequence
  HTT spacer sequence TTCN PAM
aacaaauauucugagaauua

SEQ ID NO: 34594 - RNA, 20 nt, Artificial Sequence
  HTT spacer sequence TTCN PAM
uaaaggauauauuuagaaau

SEQ ID NO: 34595 - RNA, 20 nt, Artificial Sequence
  HTT spacer sequence TTCN PAM
aaauauauccuuuaggaaga

SEQ ID NO: 34596 - RNA, 20 nt, Artificial Sequence
  HTT spacer sequence TTCN PAM
acagacuuuacacuuaauga

SEQ ID NO: 34597 - RNA, 20 nt, Artificial Sequence
  HTT spacer sequence TTCN PAM
accuuggccucccaaagugg

SEQ ID NO: 34598 - RNA, 20 nt, Artificial Sequence
  HTT spacer sequence TTCN PAM
agacuaugggcaacauaguu

SEQ ID NO: 34599 - RNA, 20 nt, Artificial Sequence
  HTT spacer sequence TTCN PAM
guagggacagggucaacuau

SEQ ID NO: 34600 - RNA, 20 nt, Artificial Sequence
  HTT spacer sequence TTCN PAM
cgaguagcugagacuacagg

SEQ ID NO: 34601 - RNA, 20 nt, Artificial Sequence
  HTT spacer sequence TTCN PAM
acugauuauuauuacuauua

SEQ ID NO: 34602 - RNA, 20 nt, Artificial Sequence
  HTT spacer sequence TTCN PAM
guauaaaguggaauaggcuc

SEQ ID NO: 34603 - RNA, 20 nt, Artificial Sequence
  HTT spacer sequence TTCN PAM
acuuuauacagaaacagagg

SEQ ID NO: 34604 - RNA, 20 nt, Artificial Sequence
  HTT spacer sequence TTCN PAM
uuaagugauagcauguugaa

SEQ ID NO: 34605 - RNA, 20 nt, Artificial Sequence
  HTT spacer sequence TTCN PAM
acaugcuaucacuuaaagaa

SEQ ID NO: 34606 - RNA, 20 nt, Artificial Sequence
  HTT spacer sequence TTCN PAM
auaccaacuggcucauaagu

SEQ ID NO: 34607 - RNA, 20 nt, Artificial Sequence
  HTT spacer sequence TTCN PAM
cucuaguuuccagguuuuca

SEQ ID NO: 34608 - RNA, 20 nt, Artificial Sequence
  HTT spacer sequence TTCN PAM
agguuuucagucaguugugu

SEQ ID NO: 34609 - RNA, 20 nt, Artificial Sequence
  HTT spacer sequence TTCN PAM
gucaguugugucuuuuuuga

SEQ ID NO: 34610 - RNA, 20 nt, Artificial Sequence
  HTT spacer sequence TTCN PAM
gcucaaaaaagacacaacug

SEQ ID NO: 34611 - RNA, 20 nt, Artificial Sequence
  HTT spacer sequence TTCN PAM
uucugcucaaaaaagacaca

SEQ ID NO: 34612 - RNA, 20 nt, Artificial Sequence
  HTT spacer sequence TTCN PAM
guucucucgugcuguggagu

SEQ ID NO: 34613 - RNA, 20 nt, Artificial Sequence
  HTT spacer sequence TTCN PAM
cucgugcuguggaguacaua

SEQ ID NO: 34614 - RNA, 20 nt, Artificial Sequence
  HTT spacer sequence TTCN PAM
uaccccugggucugagauuu

SEQ ID NO: 34615 - RNA, 20 nt, Artificial Sequence
  HTT spacer sequence TTCN PAM
aaauaaaucucagacccagg

SEQ ID NO: 34616 - RNA, 20 nt, Artificial Sequence
  HTT spacer sequence TTCN PAM
caaacauugaucaguuacag

SEQ ID NO: 34617 - RNA, 20 nt, Artificial Sequence
  HTT spacer sequence TTCN PAM
acucucaaacagcaacuuca

SEQ ID NO: 34618 - RNA, 20 nt, Artificial Sequence
  HTT spacer sequence TTCN PAM
gcuuaugucaugguuucaac

SEQ ID NO: 34619 - RNA, 20 nt, Artificial Sequence
  HTT spacer sequence TTCN PAM
auuucugcuuaugucauggu

SEQ ID NO: 34620 - RNA, 20 nt, Artificial Sequence
  HTT spacer sequence TTCN PAM
uuccauuucugcuuauguca

SEQ ID NO: 34621 - RNA, 20 nt, Artificial Sequence
  HTT spacer sequence TTCN PAM
uccuuccauuucugcuuaug

SEQ ID NO: 34622 - RNA, 20 nt, Artificial Sequence
  HTT spacer sequence TTCN PAM
uucuuccuuccauuucugcu

SEQ ID NO: 34623 - RNA, 20 nt, Artificial Sequence
  HTT spacer sequence TTCN PAM
cauaacugguucuuucuucc

SEQ ID NO: 34624 - RNA, 20 nt, Artificial Sequence
  HTT spacer sequence TTCN PAM
uaaucaauguucuugagagg

SEQ ID NO: 34625 - RNA, 20 nt, Artificial Sequence
  HTT spacer sequence TTCN PAM
ugagaggugugggaaaaaug

SEQ ID NO: 34626 - RNA, 20 nt, Artificial Sequence
  HTT spacer sequence TTCN PAM
cacaccucucaagaacauug

SEQ ID NO: 34627 - RNA, 20 nt, Artificial Sequence
  HTT spacer sequence TTCN PAM
ggguuuaacugcaaccagga

SEQ ID NO: 34628 - RNA, 20 nt, Artificial Sequence
  HTT spacer sequence TTCN PAM
acacacaauguucuggguuu

SEQ ID NO: 34629 - RNA, 20 nt, Artificial Sequence
  HTT spacer sequence TTCN PAM
caaaccgucaagacgcgggu

SEQ ID NO: 34630 - RNA, 20 nt, Artificial Sequence
  HTT spacer sequence TTCN PAM
agaacugugucaugagucuc

SEQ ID NO: 34631 - RNA, 20 nt, Artificial Sequence
  HTT spacer sequence TTCN PAM
ggaacacaagguccaaggca

SEQ ID NO: 34632 - RNA, 20 nt, Artificial Sequence
  HTT spacer sequence TTCN PAM
ucagagucagcacaucgaug

SEQ ID NO: 34633 - RNA, 20 nt, Artificial Sequence
  HTT spacer sequence TTCN PAM
uauuggcuggugaggacaga

SEQ ID NO: 34634 - RNA, 20 nt, Artificial Sequence
  HTT spacer sequence TTCN PAM
ggaaacccuugcagagauug

SEQ ID NO: 34635 - RNA, 20 nt, Artificial Sequence
  HTT spacer sequence TTCN PAM
agaagcucuguccucaccag

SEQ ID NO: 34636 - RNA, 20 nt, Artificial Sequence
  HTT spacer sequence TTCN PAM
gguaagugagucacauccau

SEQ ID NO: 34637 - RNA, 20 nt, Artificial Sequence
  HTT spacer sequence TTCN PAM
ugaacuaagcucaauugaaa

SEQ ID NO: 34638 - RNA, 20 nt, Artificial Sequence
  HTT spacer sequence TTCN PAM
ugaaaucuaauggaugugac

SEQ ID NO: 34639 - RNA, 20 nt, Artificial Sequence
  HTT spacer sequence TTCN PAM
auugagcuuaguucaugaaa

SEQ ID NO: 34640 - RNA, 20 nt, Artificial Sequence
  HTT spacer sequence TTCN PAM
gggaucacuugaugcaagga

SEQ ID NO: 34641 - RNA, 20 nt, Artificial Sequence
  HTT spacer sequence TTCN PAM
uugcaucaagugaucccaga

SEQ ID NO: 34642 - RNA, 20 nt, Artificial Sequence
  HTT spacer sequence TTCN PAM
gauggacaggguacuugaua

SEQ ID NO: 34643 - RNA, 20 nt, Artificial Sequence
  HTT spacer sequence TTCN PAM
ccucccaguggcuuuuugcu

SEQ ID NO: 34644 - RNA, 20 nt, Artificial Sequence
  HTT spacer sequence TTCN PAM
gcaaaaagccacugggagga

SEQ ID NO: 34645 - RNA, 20 nt, Artificial Sequence
  HTT spacer sequence TTCN PAM
aagcauagggcaaaguucag

SEQ ID NO: 34646 - RNA, 20 nt, Artificial Sequence
  HTT spacer sequence TTCN PAM
agccugggcgacagagcaag

SEQ ID NO: 34647 - RNA, 20 nt, Artificial Sequence
  HTT spacer sequence TTCN PAM
gugagcuaugauugugcuac

SEQ ID NO: 34648 - RNA, 20 nt, Artificial Sequence
  HTT spacer sequence TTCN PAM
aagcuucagugagcuaugau

SEQ ID NO: 34649 - RNA, 20 nt, Artificial Sequence
  HTT spacer sequence TTCN PAM
ccuagcuaaucgggaggcug

SEQ ID NO: 34650 - RNA, 20 nt, Artificial Sequence
  HTT spacer sequence TTCN PAM
acaaaaaauauuagccagug

SEQ ID NO: 34651 - RNA, 20 nt, Artificial Sequence
  HTT spacer sequence TTCN PAM
aggccaggcacaguggcuca

SEQ ID NO: 34652 - RNA, 20 nt, Artificial Sequence
  HTT spacer sequence TTCN PAM
acuuauauuuuaaaauucua

SEQ ID NO: 34653 - RNA, 20 nt, Artificial Sequence
  HTT spacer sequence TTCN PAM
ggauagugggaauaaaagag

SEQ ID NO: 34654 - RNA, 20 nt, Artificial Sequence
  HTT spacer sequence TTCN PAM
cacuauccagaauacuuaaa

SEQ ID NO: 34655 - RNA, 20 nt, Artificial Sequence
  HTT spacer sequence TTCN PAM
aagcucuuuuauucccacua

SEQ ID NO: 34656 - RNA, 20 nt, Artificial Sequence
  HTT spacer sequence TTCN PAM
ucuuugucuuaaacuuuuaa

SEQ ID NO: 34657 - RNA, 20 nt, Artificial Sequence
  HTT spacer sequence TTCN PAM
gcuuguuuaaaaagaauaua

SEQ ID NO: 34658 - RNA, 20 nt, Artificial Sequence
  HTT spacer sequence TTCN PAM
uuuuaaacaagcagaauuaa

SEQ ID NO: 34659 - RNA, 20 nt, Artificial Sequence
  HTT spacer sequence TTCN PAM
uuauacugaaccuagguaag

SEQ ID NO: 34660 - RNA, 20 nt, Artificial Sequence
  HTT spacer sequence TTCN PAM
guauaaugaagaguauauuc

SEQ ID NO: 34661 - RNA, 20 nt, Artificial Sequence
  HTT spacer sequence TTCN PAM
gccuggcaacagagugagac

SEQ ID NO: 34662 - RNA, 20 nt, Artificial Sequence
  HTT spacer sequence TTCN PAM
uuuucuaagaguaguuuugg

SEQ ID NO: 34663 - RNA, 20 nt, Artificial Sequence
  HTT spacer sequence TTCN PAM
aagaguaguuuuggcuggag

SEQ ID NO: 34664 - RNA, 20 nt, Artificial Sequence
  HTT spacer sequence TTCN PAM
ccagccaaaacuacucuuag

SEQ ID NO: 34665 - RNA, 20 nt, Artificial Sequence
  HTT spacer sequence TTCN PAM
uucaguacuuucuuuuagaa

SEQ ID NO: 34666 - RNA, 20 nt, Artificial Sequence
  HTT spacer sequence TTCN PAM
guacuuucuuuuagaaggga

SEQ ID NO: 34667 - RNA, 20 nt, Artificial Sequence
  HTT spacer sequence TTCN PAM
uuuagaagggaaauuuuccu

SEQ ID NO: 34668 - RNA, 20 nt, Artificial Sequence
  HTT spacer sequence TTCN PAM
aaaagaaaguacugaaagaa

SEQ ID NO: 34669 - RNA, 20 nt, Artificial Sequence
  HTT spacer sequence TTCN PAM
cuucuaaaagaaaguacuga

SEQ ID NO: 34670 - RNA, 20 nt, Artificial Sequence
  HTT spacer sequence TTCN PAM
uuuauaauuuaggguuuguu

SEQ ID NO: 34671 - RNA, 20 nt, Artificial Sequence
  HTT spacer sequence TTCN PAM
aagccaccuuuuauagagcc

SEQ ID NO: 34672 - RNA, 20 nt, Artificial Sequence
  HTT spacer sequence TTCN PAM
uuuaauccuuagaauguuua

SEQ ID NO: 34673 - RNA, 20 nt, Artificial Sequence
  HTT spacer sequence TTCN PAM
aaggauuaaaugaaauaacc

SEQ ID NO: 34674 - RNA, 20 nt, Artificial Sequence
  HTT spacer sequence TTCN PAM
cggcuccacccacagauagg

SEQ ID NO: 34675 - RNA, 20 nt, Artificial Sequence
  HTT spacer sequence TTCN PAM
guggcuugagccaauuuuau

SEQ ID NO: 34676 - RNA, 20 nt, Artificial Sequence
  HTT spacer sequence TTCN PAM
aaagacucuguaagugcccu

SEQ ID NO: 34677 - RNA, 20 nt, Artificial Sequence
  HTT spacer sequence TTCN PAM
aaauaaauacuauuucaaaa

SEQ ID NO: 34678 - RNA, 20 nt, Artificial Sequence
  HTT spacer sequence TTCN PAM
ucaaaauaaauacuauuuca

SEQ ID NO: 34679 - RNA, 20 nt, Artificial Sequence
  HTT spacer sequence TTCN PAM
uuuucuucaaaauaaauacu

SEQ ID NO: 34680 - RNA, 20 nt, Artificial Sequence
  HTT spacer sequence TTCN PAM
agacucaauaagacaguacu

SEQ ID NO: 34681 - RNA, 20 nt, Artificial Sequence
  HTT spacer sequence TTCN PAM
ucucacaauuccagacucaa

SEQ ID NO: 34682 - RNA, 20 nt, Artificial Sequence
  HTT spacer sequence TTCN PAM
agggcaccuggaugagccug

SEQ ID NO: 34683 - RNA, 20 nt, Artificial Sequence
  HTT spacer sequence TTCN PAM
uuguuaaaugugcucuuuug

SEQ ID NO: 34684 - RNA, 20 nt, Artificial Sequence
  HTT spacer sequence TTCN PAM
gcuuuugccuccaaaaagcu

SEQ ID NO: 34685 - RNA, 20 nt, Artificial Sequence
  HTT spacer sequence TTCN PAM
agaaggugaaagugaggcuu

SEQ ID NO: 34686 - RNA, 20 nt, Artificial Sequence
  HTT spacer sequence TTCN PAM
ugaagguaaaacagcaucuc

SEQ ID NO: 34687 - RNA, 20 nt, Artificial Sequence
  HTT spacer sequence TTCN PAM
ccuucuugaagguaaaacag

SEQ ID NO: 34688 - RNA, 20 nt, Artificial Sequence
  HTT spacer sequence TTCN PAM
uuguggaauuucucuaaaug

SEQ ID NO: 34689 - RNA, 20 nt, Artificial Sequence
  HTT spacer sequence TTCN PAM
acaaggaaagccucacuuuc

SEQ ID NO: 34690 - RNA, 20 nt, Artificial Sequence
  HTT spacer sequence TTCN PAM
cuaaaugcauucgucauguu

SEQ ID NO: 34691 - RNA, 20 nt, Artificial Sequence
  HTT spacer sequence TTCN PAM
ucauguuuuagauguuuauu

SEQ ID NO: 34692 - RNA, 20 nt, Artificial Sequence
  HTT spacer sequence TTCN PAM
caguuuauaucaugaaaguu

SEQ ID NO: 34693 - RNA, 20 nt, Artificial Sequence
  HTT spacer sequence TTCN PAM
ugauauaaacugugaaauaa

SEQ ID NO: 34694 - RNA, 20 nt, Artificial Sequence
  HTT spacer sequence TTCN PAM
uucucacuagcuuuccaaaa

SEQ ID NO: 34695 - RNA, 20 nt, Artificial Sequence
  HTT spacer sequence TTCN PAM
cacuagcuuuccaaaauauc

SEQ ID NO: 34696 - RNA, 20 nt, Artificial Sequence
  HTT spacer sequence TTCN PAM
aaaauaucuuaccuaaaauu

SEQ ID NO: 34697 - RNA, 20 nt, Artificial Sequence
  HTT spacer sequence TTCN PAM
cucuaaagcuuuuaaaacug

SEQ ID NO: 34698 - RNA, 20 nt, Artificial Sequence
  HTT spacer sequence TTCN PAM
ugcaguuuuaaaagcuuuag

SEQ ID NO: 34699 - RNA, 20 nt, Artificial Sequence
  HTT spacer sequence TTCN PAM
ucuccaagcaaauggaugac

SEQ ID NO: 34700 - RNA, 20 nt, Artificial Sequence
  HTT spacer sequence TTCN PAM
uuuuuugguugaaguacuaa

SEQ ID NO: 34701 - RNA, 20 nt, Artificial Sequence
  HTT spacer sequence TTCN PAM
accaaaaaaggaaaagagau

SEQ ID NO: 34702 - RNA, 20 nt, Artificial Sequence
  HTT spacer sequence TTCN PAM
cguaucuuuuaguacuucaa

SEQ ID NO: 34703 - RNA, 20 nt, Artificial Sequence
  HTT spacer sequence TTCN PAM
auucucguaucuuuuaguac

SEQ ID NO: 34704 - RNA, 20 nt, Artificial Sequence
  HTT spacer sequence TTCN PAM
cucucuuuccauucucguau

SEQ ID NO: 34705 - RNA, 20 nt, Artificial Sequence
  HTT spacer sequence TTCN PAM
ucccucucuuuccauucucg

SEQ ID NO: 34706 - RNA, 20 nt, Artificial Sequence
  HTT spacer sequence TTCN PAM
aaggauguagagcaguauuc

SEQ ID NO: 34707 - RNA, 20 nt, Artificial Sequence
  HTT spacer sequence TTCN PAM
ugaaucugagcucauuucag

SEQ ID NO: 34708 - RNA, 20 nt, Artificial Sequence
  HTT spacer sequence TTCN PAM
ggaauacugcucuacauccu

SEQ ID NO: 34709 - RNA, 20 nt, Artificial Sequence
  HTT spacer sequence TTCN PAM
gccauucuauucuuaaacua

SEQ ID NO: 34710 - RNA, 20 nt, Artificial Sequence
  HTT spacer sequence TTCN PAM
auucuuaaacuauaaugaaa

SEQ ID NO: 34711 - RNA, 20 nt, Artificial Sequence
  HTT spacer sequence TTCN PAM
uaaacuauaaugaaaaaaaa

SEQ ID NO: 34712 - RNA, 20 nt, Artificial Sequence
  HTT spacer sequence TTCN PAM
uuauaguuuaagaauagaau

SEQ ID NO: 34713 - RNA, 20 nt, Artificial Sequence
  HTT spacer sequence TTCN PAM
uuguaaaaauuuuggacuau

SEQ ID NO: 34714 - RNA, 20 nt, Artificial Sequence
  HTT spacer sequence TTCN PAM
cuauaguccaaaauuuuuac

SEQ ID NO: 34715 - RNA, 20 nt, Artificial Sequence
  HTT spacer sequence TTCN PAM
uaguacuauucucuauaguc

SEQ ID NO: 34716 - RNA, 20 nt, Artificial Sequence
  HTT spacer sequence TTCN PAM
ucuuaguacuauucucuaua

SEQ ID NO: 34717 - RNA, 20 nt, Artificial Sequence
  HTT spacer sequence TTCN PAM
auucugcugccaccuggagg

SEQ ID NO: 34718 - RNA, 20 nt, Artificial Sequence
  HTT spacer sequence TTCN PAM
gcugccaccuggagguaauc

SEQ ID NO: 34719 - RNA, 20 nt, Artificial Sequence
  HTT spacer sequence TTCN PAM
uguucaaaaucaggucaaaa

SEQ ID NO: 34720 - RNA, 20 nt, Artificial Sequence
  HTT spacer sequence TTCN PAM
aaaucaggucaaaauuacau

SEQ ID NO: 34721 - RNA, 20 nt, Artificial Sequence
  HTT spacer sequence TTCN PAM
acuuaauauuuuauuagcau

SEQ ID NO: 34722 - RNA, 20 nt, Artificial Sequence
  HTT spacer sequence TTCN PAM
uguuaugaaacaguaauuuu

SEQ ID NO: 34723 - RNA, 20 nt, Artificial Sequence
  HTT spacer sequence TTCN PAM
uaacaggaaaaugcuaauaa

SEQ ID NO: 34724 - RNA, 20 nt, Artificial Sequence
  HTT spacer sequence TTCN PAM
uuuucugagaauuccuggaa

SEQ ID NO: 34725 - RNA, 20 nt, Artificial Sequence
  HTT spacer sequence TTCN PAM
gagaauuccuggaaguugag

SEQ ID NO: 34726 - RNA, 20 nt, Artificial Sequence
  HTT spacer sequence TTCN PAM
cagaaaaagaaaacuauaca

SEQ ID NO: 34727 - RNA, 20 nt, Artificial Sequence
  HTT spacer sequence TTCN PAM
uggaaguugaguuaccaggc

SEQ ID NO: 34728 - RNA, 20 nt, Artificial Sequence
  HTT spacer sequence TTCN PAM
aggaauucucagaaaaagaa

SEQ ID NO: 34729 - RNA, 20 nt, Artificial Sequence
  HTT spacer sequence TTCN PAM
aagccgggccugguaacuca

SEQ ID NO: 34730 - RNA, 20 nt, Artificial Sequence
  HTT spacer sequence TTCN PAM
agcgauucuccugccucagc

SEQ ID NO: 34731 - RNA, 20 nt, Artificial Sequence
  HTT spacer sequence TTCN PAM
ccugccucagccucccgagu

SEQ ID NO: 34732 - RNA, 20 nt, Artificial Sequence
  HTT spacer sequence TTCN PAM
cgauauuggccaggcugguc

SEQ ID NO: 34733 - RNA, 20 nt, Artificial Sequence
  HTT spacer sequence TTCN PAM
agaccagccuggccaauauc

SEQ ID NO: 34734 - RNA, 20 nt, Artificial Sequence
  HTT spacer sequence TTCN PAM
gaccccgugauccaccugca

SEQ ID NO: 34735 - RNA, 20 nt, Artificial Sequence
  HTT spacer sequence TTCN PAM
aauagcuuuauggagguuau

SEQ ID NO: 34736 - RNA, 20 nt, Artificial Sequence
  HTT spacer sequence TTCN PAM
ugaaauguacucacuuugag

SEQ ID NO: 34737 - RNA, 20 nt, Artificial Sequence
  HTT spacer sequence TTCN PAM
agaaauguaaauuauaaccu

SEQ ID NO: 34738 - RNA, 20 nt, Artificial Sequence
  HTT spacer sequence TTCN PAM
gucaccccaaauguauccuu

SEQ ID NO: 34739 - RNA, 20 nt, Artificial Sequence
  HTT spacer sequence TTCN PAM
ugccccaacuccuaggcagc

SEQ ID NO: 34740 - RNA, 20 nt, Artificial Sequence
  HTT spacer sequence TTCN PAM
gucccuuaagauuuguguuu

SEQ ID NO: 34741 - RNA, 20 nt, Artificial Sequence
  HTT spacer sequence TTCN PAM
ccaggcgcucaugccuguaa

SEQ ID NO: 34742 - RNA, 20 nt, Artificial Sequence
  HTT spacer sequence TTCN PAM
agaccagccuggccaacaug

SEQ ID NO: 34743 - RNA, 20 nt, Artificial Sequence
  HTT spacer sequence TTCN PAM
ccauguuggccaggcugguc

SEQ ID NO: 34744 - RNA, 20 nt, Artificial Sequence
  HTT spacer sequence TTCN PAM
ccugccucagccucccgagu

SEQ ID NO: 34745 - RNA, 20 nt, Artificial Sequence
  HTT spacer sequence TTCN PAM
agugauucuccugccucagc

SEQ ID NO: 34746 - RNA, 20 nt, Artificial Sequence
  HTT spacer sequence TTCN PAM
aaccugggcaacagagagag

SEQ ID NO: 34747 - RNA, 20 nt, Artificial Sequence
  HTT spacer sequence TTCN PAM
ggacauuuuauaguacuggg

SEQ ID NO: 34748 - RNA, 20 nt, Artificial Sequence
  HTT spacer sequence TTCN PAM
uuuacuuaauugugagauug

SEQ ID NO: 34749 - RNA, 20 nt, Artificial Sequence
  HTT spacer sequence TTCN PAM
uguuguagcauguaucagua

SEQ ID NO: 34750 - RNA, 20 nt, Artificial Sequence
  HTT spacer sequence TTCN PAM
uuuuuauuggcgaaaguauu

SEQ ID NO: 34751 - RNA, 20 nt, Artificial Sequence
  HTT spacer sequence TTCN PAM
ccaauaaaaaugaacaaacu

SEQ ID NO: 34752 - RNA, 20 nt, Artificial Sequence
  HTT spacer sequence TTCN PAM
auuauaugaauaauaccaua

SEQ ID NO: 34753 - RNA, 20 nt, Artificial Sequence
  HTT spacer sequence TTCN PAM
uauaauagaauacuuucgcc

SEQ ID NO: 34754 - RNA, 20 nt, Artificial Sequence
  HTT spacer sequence TTCN PAM
uguuuuggcuaauuuaugaa

SEQ ID NO: 34755 - RNA, 20 nt, Artificial Sequence
  HTT spacer sequence TTCN PAM
uaaauuagccaaaacaugaa

SEQ ID NO: 34756 - RNA, 20 nt, Artificial Sequence
  HTT spacer sequence TTCN PAM
caguaccauaauucauaaau

SEQ ID NO: 34757 - RNA, 20 nt, Artificial Sequence
  HTT spacer sequence TTCN PAM
uuucucuugaguagaucacc

SEQ ID NO: 34758 - RNA, 20 nt, Artificial Sequence
  HTT spacer sequence TTCN PAM
cuugaguagaucaccuagaa

SEQ ID NO: 34759 - RNA, 20 nt, Artificial Sequence
  HTT spacer sequence TTCN PAM
aggugaucuacucaagagaa

SEQ ID NO: 34760 - RNA, 20 nt, Artificial Sequence
  HTT spacer sequence TTCN PAM
caguaaguaccaaaauuauu

SEQ ID NO: 34761 - RNA, 20 nt, Artificial Sequence
  HTT spacer sequence TTCN PAM
aaaacauaccauuguuccuu

SEQ ID NO: 34762 - RNA, 20 nt, Artificial Sequence
  HTT spacer sequence TTCN PAM
uuccuuccuuccuuccuucc

SEQ ID NO: 34763 - RNA, 20 nt, Artificial Sequence
  HTT spacer sequence TTCN PAM
uuccuuccuuccuuccuucc

SEQ ID NO: 34764 - RNA, 20 nt, Artificial Sequence
  HTT spacer sequence TTCN PAM
uuccuuccuuccuuccuucc

SEQ ID NO: 34765 - RNA, 20 nt, Artificial Sequence
  HTT spacer sequence TTCN PAM
uuccuuccuuccuuccuucu

SEQ ID NO: 34766 - RNA, 20 nt, Artificial Sequence
  HTT spacer sequence TTCN PAM
uuccuuccuuccuucuuucc

SEQ ID NO: 34767 - RNA, 20 nt, Artificial Sequence
  HTT spacer sequence TTCN PAM
uuccuuccuucuuuccuucc

SEQ ID NO: 34768 - RNA, 20 nt, Artificial Sequence
  HTT spacer sequence TTCN PAM
uuccuucuuuccuuccuccc

SEQ ID NO: 34769 - RNA, 20 nt, Artificial Sequence
  HTT spacer sequence TTCN PAM
uucuuuccuuccucccuucc

SEQ ID NO: 34770 - RNA, 20 nt, Artificial Sequence
  HTT spacer sequence TTCN PAM
uuccuuccucccuuccuccc

SEQ ID NO: 34771 - RNA, 20 nt, Artificial Sequence
  HTT spacer sequence TTCN PAM
uuccucccuuccucccuccc

SEQ ID NO: 34772 - RNA, 20 nt, Artificial Sequence
  HTT spacer sequence TTCN PAM
ucccuuccucccucccuucc

SEQ ID NO: 34773 - RNA, 20 nt, Artificial Sequence
  HTT spacer sequence TTCN PAM
ucccucccuucccuacuucc

SEQ ID NO: 34774 - RNA, 20 nt, Artificial Sequence
  HTT spacer sequence TTCN PAM
cuacuucccucucccuuucc

SEQ ID NO: 34775 - RNA, 20 nt, Artificial Sequence
  HTT spacer sequence TTCN PAM
cucucccuuucccuuucccu

SEQ ID NO: 34776 - RNA, 20 nt, Artificial Sequence
  HTT spacer sequence TTCN PAM
cuuucccuuccccuuuuccc

SEQ ID NO: 34777 - RNA, 20 nt, Artificial Sequence
  HTT spacer sequence TTCN PAM
cuuccccuuuucccuucccc

SEQ ID NO: 34778 - RNA, 20 nt, Artificial Sequence
  HTT spacer sequence TTCN PAM
ccuuuucccuuccccuuccc

SEQ ID NO: 34779 - RNA, 20 nt, Artificial Sequence
  HTT spacer sequence TTCN PAM
cuuccccuucccgccugccu

SEQ ID NO: 34780 - RNA, 20 nt, Artificial Sequence
  HTT spacer sequence TTCN PAM
ccuucccgccugccugccug

SEQ ID NO: 34781 - RNA, 20 nt, Artificial Sequence
  HTT spacer sequence TTCN PAM
cgccugccugccugccugcc

SEQ ID NO: 34782 - RNA, 20 nt, Artificial Sequence
  HTT spacer sequence TTCN PAM
uuccuuccuuccuucguuuc

SEQ ID NO: 34783 - RNA, 20 nt, Artificial Sequence
  HTT spacer sequence TTCN PAM
uuccuuccuucguuucuuuc

SEQ ID NO: 34784 - RNA, 20 nt, Artificial Sequence
  HTT spacer sequence TTCN PAM
uuccuucguuucuuucuaca

SEQ ID NO: 34785 - RNA, 20 nt, Artificial Sequence
  HTT spacer sequence TTCN PAM
uucguuucuuucuacauaua

SEQ ID NO: 34786 - RNA, 20 nt, Artificial Sequence
  HTT spacer sequence TTCN PAM
uuucuuucuacauauacaca

SEQ ID NO: 34787 - RNA, 20 nt, Artificial Sequence
  HTT spacer sequence TTCN PAM
uucuacauauacacauuuuu

SEQ ID NO: 34788 - RNA, 20 nt, Artificial Sequence
  HTT spacer sequence TTCN PAM
acauauacacauuuuuuuaa

SEQ ID NO: 34789 - RNA, 20 nt, Artificial Sequence
  HTT spacer sequence TTCN PAM
augguuuuugggguacaagu

SEQ ID NO: 34790 - RNA, 20 nt, Artificial Sequence
  HTT spacer sequence TTCN PAM
gccauguaaccaaaaaccac

SEQ ID NO: 34791 - RNA, 20 nt, Artificial Sequence
  HTT spacer sequence TTCN PAM
ccauguaaccaaaauucagc

SEQ ID NO: 34792 - RNA, 20 nt, Artificial Sequence
  HTT spacer sequence TTCN PAM
agccuuccgccuugugaguc

SEQ ID NO: 34793 - RNA, 20 nt, Artificial Sequence
  HTT spacer sequence TTCN PAM
gccuugugagucuccaaugu

SEQ ID NO: 34794 - RNA, 20 nt, Artificial Sequence
  HTT spacer sequence TTCN PAM
gagaacauauagcagaaaca

SEQ ID NO: 34795 - RNA, 20 nt, Artificial Sequence
  HTT spacer sequence TTCN PAM
cagaagugggagcugagcug

SEQ ID NO: 34796 - RNA, 20 nt, Artificial Sequence
  HTT spacer sequence TTCN PAM
gcuauauguucucagaagug

SEQ ID NO: 34797 - RNA, 20 nt, Artificial Sequence
  HTT spacer sequence TTCN PAM
gguagugggaguauacuuug

SEQ ID NO: 34798 - RNA, 20 nt, Artificial Sequence
  HTT spacer sequence TTCN PAM
ucucaccaguacaaauauuu

SEQ ID NO: 34799 - RNA, 20 nt, Artificial Sequence
  HTT spacer sequence TTCN PAM
caccaguacaaauauuucaa

SEQ ID NO: 34800 - RNA, 20 nt, Artificial Sequence
  HTT spacer sequence TTCN PAM
aaaaaaguuaaauauguauc

SEQ ID NO: 34801 - RNA, 20 nt, Artificial Sequence
  HTT spacer sequence TTCN PAM
gcccaaaaaacugauacaua

SEQ ID NO: 34802 - RNA, 20 nt, Artificial Sequence
  HTT spacer sequence TTCN PAM
cuuuauuuauuuauuuuuuu

SEQ ID NO: 34803 - RNA, 20 nt, Artificial Sequence
  HTT spacer sequence TTCN PAM
augaugcccaggcuggagug

SEQ ID NO: 34804 - RNA, 20 nt, Artificial Sequence
  HTT spacer sequence TTCN PAM
agugauucccacgucagccu

SEQ ID NO: 34805 - RNA, 20 nt, Artificial Sequence
  HTT spacer sequence TTCN PAM
cacgucagccucccaggaag

SEQ ID NO: 34806 - RNA, 20 nt, Artificial Sequence
  HTT spacer sequence TTCN PAM
ugggaggcugacgugggaau

SEQ ID NO: 34807 - RNA, 20 nt, Artificial Sequence
  HTT spacer sequence TTCN PAM
agcuuccugggaggcugacg

SEQ ID NO: 34808 - RNA, 20 nt, Artificial Sequence
  HTT spacer sequence TTCN PAM
ccauguuggccagacugguc

SEQ ID NO: 34809 - RNA, 20 nt, Artificial Sequence
  HTT spacer sequence TTCN PAM
aaagugcugggauuacaggc

SEQ ID NO: 34810 - RNA, 20 nt, Artificial Sequence
  HTT spacer sequence TTCN PAM
uuuuaaaauaacuuaccuuc

SEQ ID NO: 34811 - RNA, 20 nt, Artificial Sequence
  HTT spacer sequence TTCN PAM
uuugaaaguaauacauguuu

SEQ ID NO: 34812 - RNA, 20 nt, Artificial Sequence
  HTT spacer sequence TTCN PAM
aaagaagguaaguuauuuua

SEQ ID NO: 34813 - RNA, 20 nt, Artificial Sequence
  HTT spacer sequence TTCN PAM
uuaaacauguauuacuuuca

SEQ ID NO: 34814 - RNA, 20 nt, Artificial Sequence
  HTT spacer sequence TTCN PAM
guucauuaaacauguauuac

SEQ ID NO: 34815 - RNA, 20 nt, Artificial Sequence
  HTT spacer sequence TTCN PAM
uuaaauucuguucauuaaac

SEQ ID NO: 34816 - RNA, 20 nt, Artificial Sequence
  HTT spacer sequence TTCN PAM
uuuuuuuauauuuuccuuaa

SEQ ID NO: 34817 - RNA, 20 nt, Artificial Sequence
  HTT spacer sequence TTCN PAM
guaguuugauuacaaagauu

SEQ ID NO: 34818 - RNA, 20 nt, Artificial Sequence
  HTT spacer sequence TTCN PAM
uuucaguaguuugauuacaa

SEQ ID NO: 34819 - RNA, 20 nt, Artificial Sequence
  HTT spacer sequence TTCN PAM
uuuucauuuucaucauugua

SEQ ID NO: 34820 - RNA, 20 nt, Artificial Sequence
  HTT spacer sequence TTCN PAM
uuuucaucauuguaauuugc

SEQ ID NO: 34821 - RNA, 20 nt, Artificial Sequence
  HTT spacer sequence TTCN PAM
ucauuguaauuugcauuucu

SEQ ID NO: 34822 - RNA, 20 nt, Artificial Sequence
  HTT spacer sequence TTCN PAM
uugauuacuugugagacacu

SEQ ID NO: 34823 - RNA, 20 nt, Artificial Sequence
  HTT spacer sequence TTCN PAM
uuuacuuaauagguuuauau

SEQ ID NO: 34824 - RNA, 20 nt, Artificial Sequence
  HTT spacer sequence TTCN PAM
gagauuuugcagcuuuacca

SEQ ID NO: 34825 - RNA, 20 nt, Artificial Sequence
  HTT spacer sequence TTCN PAM
gcaaaugauagcaacuucuu

SEQ ID NO: 34826 - RNA, 20 nt, Artificial Sequence
  HTT spacer sequence TTCN PAM
uuuuguuuguuuguuugugg

SEQ ID NO: 34827 - RNA, 20 nt, Artificial Sequence
  HTT spacer sequence TTCN PAM
ugccugagugacagagcgag

SEQ ID NO: 34828 - RNA, 20 nt, Artificial Sequence
  HTT spacer sequence TTCN PAM
accacugcauuccugccuga

SEQ ID NO: 34829 - RNA, 20 nt, Artificial Sequence
  HTT spacer sequence TTCN PAM
agcgauuuuccugccucagc

SEQ ID NO: 34830 - RNA, 20 nt, Artificial Sequence
  HTT spacer sequence TTCN PAM
ugccucagccucccaaguag

SEQ ID NO: 34831 - RNA, 20 nt, Artificial Sequence
  HTT spacer sequence TTCN PAM
agaucagcccggccaacaug

SEQ ID NO: 34832 - RNA, 20 nt, Artificial Sequence
  HTT spacer sequence TTCN PAM
uauauucuagaaaaaauucu

SEQ ID NO: 34833 - RNA, 20 nt, Artificial Sequence
  HTT spacer sequence TTCN PAM
agaaaaaauucuacucauga

SEQ ID NO: 34834 - RNA, 20 nt, Artificial Sequence
  HTT spacer sequence TTCN PAM
agaauauaagaaguaacuac

SEQ ID NO: 34835 - RNA, 20 nt, Artificial Sequence
  HTT spacer sequence TTCN PAM
acucaugaucaagucuccau

SEQ ID NO: 34836 - RNA, 20 nt, Artificial Sequence
  HTT spacer sequence TTCN PAM
ucauggagacuugaucauga

SEQ ID NO: 34837 - RNA, 20 nt, Artificial Sequence
  HTT spacer sequence TTCN PAM
auuaaagucucuuuccucau

SEQ ID NO: 34838 - RNA, 20 nt, Artificial Sequence
  HTT spacer sequence TTCN PAM
uuguuucuaaaaguauuacu

SEQ ID NO: 34839 - RNA, 20 nt, Artificial Sequence
  HTT spacer sequence TTCN PAM
aaaaguauuacugaguguug

SEQ ID NO: 34840 - RNA, 20 nt, Artificial Sequence
  HTT spacer sequence TTCN PAM
uaucugccaucaacacucag

SEQ ID NO: 34841 - RNA, 20 nt, Artificial Sequence
  HTT spacer sequence TTCN PAM
uacaaaaacaaaaggguuca

SEQ ID NO: 34842 - RNA, 20 nt, Artificial Sequence
  HTT spacer sequence TTCN PAM
ccauuugaauucaguuuaga

SEQ ID NO: 34843 - RNA, 20 nt, Artificial Sequence
  HTT spacer sequence TTCN PAM
aauggagaauacggguaaca

SEQ ID NO: 34844 - RNA, 20 nt, Artificial Sequence
  HTT spacer sequence TTCN PAM
guuuagauuuguuaggaauc

SEQ ID NO: 34845 - RNA, 20 nt, Artificial Sequence
  HTT spacer sequence TTCN PAM
uaacaaaucuaaacugaauu

SEQ ID NO: 34846 - RNA, 20 nt, Artificial Sequence
  HTT spacer sequence TTCN PAM
uuaggcacuuuugcaauuuu

SEQ ID NO: 34847 - RNA, 20 nt, Artificial Sequence
  HTT spacer sequence TTCN PAM
gaccugcucugugcucagua

SEQ ID NO: 34848 - RNA, 20 nt, Artificial Sequence
  HTT spacer sequence TTCN PAM
gcacuuguugaucagaaggu

SEQ ID NO: 34849 - RNA, 20 nt, Artificial Sequence
  HTT spacer sequence TTCN PAM
gaucaacaagugcugaacag

SEQ ID NO: 34850 - RNA, 20 nt, Artificial Sequence
  HTT spacer sequence TTCN PAM
aaaccuucugaucaacaagu

SEQ ID NO: 34851 - RNA, 20 nt, Artificial Sequence
  HTT spacer sequence TTCN PAM
cuuucuaaaccuucugauca

SEQ ID NO: 34852 - RNA, 20 nt, Artificial Sequence
  HTT spacer sequence TTCN PAM
aaguugguuuuuaauuaaag

SEQ ID NO: 34853 - RNA, 20 nt, Artificial Sequence
  HTT spacer sequence TTCN PAM
auuuacacuauuaaaugcuu

SEQ ID NO: 34854 - RNA, 20 nt, Artificial Sequence
  HTT spacer sequence TTCN PAM
uuugucugucauaaaauuua

SEQ ID NO: 34855 - RNA, 20 nt, Artificial Sequence
  HTT spacer sequence TTCN PAM
agaguucaagaacagccugg

SEQ ID NO: 34856 - RNA, 20 nt, Artificial Sequence
  HTT spacer sequence TTCN PAM
agaacagccuggccaaggug

SEQ ID NO: 34857 - RNA, 20 nt, Artificial Sequence
  HTT spacer sequence TTCN PAM
ugaacucuugaacuccugac

SEQ ID NO: 34858 - RNA, 20 nt, Artificial Sequence
  HTT spacer sequence TTCN PAM
ucaccuuggccaggcuguuc

SEQ ID NO: 34859 - RNA, 20 nt, Artificial Sequence
  HTT spacer sequence TTCN PAM
ccugccucagccuccugagu

SEQ ID NO: 34860 - RNA, 20 nt, Artificial Sequence
  HTT spacer sequence TTCN PAM
agugauucuccugccucagc

SEQ ID NO: 34861 - RNA, 20 nt, Artificial Sequence
  HTT spacer sequence TTCN PAM
gucucaaaaaaaaaaaaaaa

SEQ ID NO: 34862 - RNA, 20 nt, Artificial Sequence
  HTT spacer sequence TTCN PAM
uuuuuuuuuuuuuuugagac

SEQ ID NO: 34863 - RNA, 20 nt, Artificial Sequence
  HTT spacer sequence TTCN PAM
uuuuuucuuuuuuuuuuuuu

SEQ ID NO: 34864 - RNA, 20 nt, Artificial Sequence
  HTT spacer sequence TTCN PAM
agcacgugacagcguugucu

SEQ ID NO: 34865 - RNA, 20 nt, Artificial Sequence
  HTT spacer sequence TTCN PAM
ucaagcacgugacagcguug

SEQ ID NO: 34866 - RNA, 20 nt, Artificial Sequence
  HTT spacer sequence TTCN PAM
cagguggcguucuucaagca

SEQ ID NO: 34867 - RNA, 20 nt, Artificial Sequence
  HTT spacer sequence TTCN PAM
cgcccccuuucucagguggc

SEQ ID NO: 34868 - RNA, 20 nt, Artificial Sequence
  HTT spacer sequence TTCN PAM
ucuacuuucuuaagcaaauu

SEQ ID NO: 34869 - RNA, 20 nt, Artificial Sequence
  HTT spacer sequence TTCN PAM
uaagcaaauuaaccuuacuu

SEQ ID NO: 34870 - RNA, 20 nt, Artificial Sequence
  HTT spacer sequence TTCN PAM
gguaaacacugcuuugaucu

SEQ ID NO: 34871 - RNA, 20 nt, Artificial Sequence
  HTT spacer sequence TTCN PAM
caugcaugagacgcagccuc

SEQ ID NO: 34872 - RNA, 20 nt, Artificial Sequence
  HTT spacer sequence TTCN PAM
ccgucagcacaauaaccagg

SEQ ID NO: 34873 - RNA, 20 nt, Artificial Sequence
  HTT spacer sequence TTCN PAM
cauugucgggaaaaugcccu

SEQ ID NO: 34874 - RNA, 20 nt, Artificial Sequence
  HTT spacer sequence TTCN PAM
cgacaaugugaagaugccac

SEQ ID NO: 34875 - RNA, 20 nt, Artificial Sequence
  HTT spacer sequence TTCN PAM
ugaugccuuucuuuaggcuu

SEQ ID NO: 34876 - RNA, 20 nt, Artificial Sequence
  HTT spacer sequence TTCN PAM
uuaggcuuuaauugaaaaca

SEQ ID NO: 34877 - RNA, 20 nt, Artificial Sequence
  HTT spacer sequence TTCN PAM
auuaaagccuaaagaaaggc

SEQ ID NO: 34878 - RNA, 20 nt, Artificial Sequence
  HTT spacer sequence TTCN PAM
agaaaaaagcuucagcucag

SEQ ID NO: 34879 - RNA, 20 nt, Artificial Sequence
  HTT spacer sequence TTCN PAM
agaaaauaaaauguuuucaa

SEQ ID NO: 34880 - RNA, 20 nt, Artificial Sequence
  HTT spacer sequence TTCN PAM
gcucaggauguuugagugua

SEQ ID NO: 34881 - RNA, 20 nt, Artificial Sequence
  HTT spacer sequence TTCN PAM
augugcugacaguuguauuu

SEQ ID NO: 34882 - RNA, 20 nt, Artificial Sequence
  HTT spacer sequence TTCN PAM
cuuuaguuguguuaccuuua

SEQ ID NO: 34883 - RNA, 20 nt, Artificial Sequence
  HTT spacer sequence TTCN PAM
aucaugccuguugauuuuuu

SEQ ID NO: 34884 - RNA, 20 nt, Artificial Sequence
  HTT spacer sequence TTCN PAM
gugauuugcgagauuaucau

SEQ ID NO: 34885 - RNA, 20 nt, Artificial Sequence
  HTT spacer sequence TTCN PAM
cauuuauuguggagcuuuug

SEQ ID NO: 34886 - RNA, 20 nt, Artificial Sequence
  HTT spacer sequence TTCN PAM
aaagcuccacaauaaaugug

SEQ ID NO: 34887 - RNA, 20 nt, Artificial Sequence
  HTT spacer sequence TTCN PAM
uaucugcuucuuaggugagu

SEQ ID NO: 34888 - RNA, 20 nt, Artificial Sequence
  HTT spacer sequence TTCN PAM
uaggugagugggacacagug

SEQ ID NO: 34889 - RNA, 20 nt, Artificial Sequence
  HTT spacer sequence TTCN PAM
uuaaagcacugugucccacu

SEQ ID NO: 34890 - RNA, 20 nt, Artificial Sequence
  HTT spacer sequence TTCN PAM
gaauucuagcuugcagagaa

SEQ ID NO: 34891 - RNA, 20 nt, Artificial Sequence
  HTT spacer sequence TTCN PAM
gaagauuauagcuucauuaa

SEQ ID NO: 34892 - RNA, 20 nt, Artificial Sequence
  HTT spacer sequence TTCN PAM
agcuugcagagaagauugca

SEQ ID NO: 34893 - RNA, 20 nt, Artificial Sequence
  HTT spacer sequence TTCN PAM
cugcaagcuagaauucugaa

SEQ ID NO: 34894 - RNA, 20 nt, Artificial Sequence
  HTT spacer sequence TTCN PAM
gcaaucuucucugcaagcua

SEQ ID NO: 34895 - RNA, 20 nt, Artificial Sequence
  HTT spacer sequence TTCN PAM
gcugaguaacaguguuuuac

SEQ ID NO: 34896 - RNA, 20 nt, Artificial Sequence
  HTT spacer sequence TTCN PAM
aagcuuaaaugaucacuuga

SEQ ID NO: 34897 - RNA, 20 nt, Artificial Sequence
  HTT spacer sequence TTCN PAM
gaauuaggaacucagcuuau

SEQ ID NO: 34898 - RNA, 20 nt, Artificial Sequence
  HTT spacer sequence TTCN PAM
gaaaaaaagcaucaagugau

SEQ ID NO: 34899 - RNA, 20 nt, Artificial Sequence
  HTT spacer sequence TTCN PAM
uaauucagaaaaaaagcauc

SEQ ID NO: 34900 - RNA, 20 nt, Artificial Sequence
  HTT spacer sequence TTCN PAM
ugaauaaauaacgucuuuuu

SEQ ID NO: 34901 - RNA, 20 nt, Artificial Sequence
  HTT spacer sequence TTCN PAM
ggaauuaugacuuugauauu

SEQ ID NO: 34902 - RNA, 20 nt, Artificial Sequence
  HTT spacer sequence TTCN PAM
uguaaagacugcuuuaaaaa

SEQ ID NO: 34903 - RNA, 20 nt, Artificial Sequence
  HTT spacer sequence TTCN PAM
auguguuuuuuaaagcaguc

SEQ ID NO: 34904 - RNA, 20 nt, Artificial Sequence
  HTT spacer sequence TTCN PAM
agaccacccagggcaacaug

SEQ ID NO: 34905 - RNA, 20 nt, Artificial Sequence
  HTT spacer sequence TTCN PAM
caucccucagccucccgagu

SEQ ID NO: 34906 - RNA, 20 nt, Artificial Sequence
  HTT spacer sequence TTCN PAM
ccucagauaauuuccuuugu

SEQ ID NO: 34907 - RNA, 20 nt, Artificial Sequence
  HTT spacer sequence TTCN PAM
uuuguuuaaacucagaacug

SEQ ID NO: 34908 - RNA, 20 nt, Artificial Sequence
  HTT spacer sequence TTCN PAM
gaguuuaaacaaaggaaauu

SEQ ID NO: 34909 - RNA, 20 nt, Artificial Sequence
  HTT spacer sequence TTCN PAM
cucuuggagaagauucagga

SEQ ID NO: 34910 - RNA, 20 nt, Artificial Sequence
  HTT spacer sequence TTCN PAM
ccaagagagaaaaugccagu

SEQ ID NO: 34911 - RNA, 20 nt, Artificial Sequence
  HTT spacer sequence TTCN PAM
ggacaaauacuccuuuaaga

SEQ ID NO: 34912 - RNA, 20 nt, Artificial Sequence
  HTT spacer sequence TTCN PAM
acuuaucuuaaaggaguauu

SEQ ID NO: 34913 - RNA, 20 nt, Artificial Sequence
  HTT spacer sequence TTCN PAM
cugcuucuacuuaucuuaaa

SEQ ID NO: 34914 - RNA, 20 nt, Artificial Sequence
  HTT spacer sequence TTCN PAM
ugauaaucaaauccucuuuc

SEQ ID NO: 34915 - RNA, 20 nt, Artificial Sequence
  HTT spacer sequence TTCN PAM
aagcuuaucaaauuccugau

SEQ ID NO: 34916 - RNA, 20 nt, Artificial Sequence
  HTT spacer sequence TTCN PAM
uaaugucauuucagaagaug

SEQ ID NO: 34917 - RNA, 20 nt, Artificial Sequence
  HTT spacer sequence TTCN PAM
gaagaugaauauuuauuaau

SEQ ID NO: 34918 - RNA, 20 nt, Artificial Sequence
  HTT spacer sequence TTCN PAM
gaaaugacauuaagaagcaa

SEQ ID NO: 34919 - RNA, 20 nt, Artificial Sequence
  HTT spacer sequence TTCN PAM
ucuucugaaaugacauuaag

SEQ ID NO: 34920 - RNA, 20 nt, Artificial Sequence
  HTT spacer sequence TTCN PAM
aaguaguaguuaguaaucaa

SEQ ID NO: 34921 - RNA, 20 nt, Artificial Sequence
  HTT spacer sequence TTCN PAM
aaacuucagcaggccucuug

SEQ ID NO: 34922 - RNA, 20 nt, Artificial Sequence
  HTT spacer sequence TTCN PAM
gcaggccucuugacaauuca

SEQ ID NO: 34923 - RNA, 20 nt, Artificial Sequence
  HTT spacer sequence TTCN PAM
gcuguggucaauugggucuu

SEQ ID NO: 34924 - RNA, 20 nt, Artificial Sequence
  HTT spacer sequence TTCN PAM
guuagcauucauguguuaac

SEQ ID NO: 34925 - RNA, 20 nt, Artificial Sequence
  HTT spacer sequence TTCN PAM
uguguuaacuuaaaaucaua

SEQ ID NO: 34926 - RNA, 20 nt, Artificial Sequence
  HTT spacer sequence TTCN PAM
aaccacugggguauuauaau

SEQ ID NO: 34927 - RNA, 20 nt, Artificial Sequence
  HTT spacer sequence TTCN PAM
uuuauaauuuauuuuauuuu

SEQ ID NO: 34928 - RNA, 20 nt, Artificial Sequence
  HTT spacer sequence TTCN PAM
auguguucuaaaggaauuag

SEQ ID NO: 34929 - RNA, 20 nt, Artificial Sequence
  HTT spacer sequence TTCN PAM
aaaggaauuagaguuuguau

SEQ ID NO: 34930 - RNA, 20 nt, Artificial Sequence
  HTT spacer sequence TTCN PAM
uuuagaacacauggaaaaaa

SEQ ID NO: 34931 - RNA, 20 nt, Artificial Sequence
  HTT spacer sequence TTCN PAM
aucccccauuauaguuauau

SEQ ID NO: 34932 - RNA, 20 nt, Artificial Sequence
  HTT spacer sequence TTCN PAM
uggcacaugucaauuucuau

SEQ ID NO: 34933 - RNA, 20 nt, Artificial Sequence
  HTT spacer sequence TTCN PAM
cuucauggcacaugucaauu

SEQ ID NO: 34934 - RNA, 20 nt, Artificial Sequence
  HTT spacer sequence TTCN PAM
caucucccacggcacuuuuu

SEQ ID NO: 34935 - RNA, 20 nt, Artificial Sequence
  HTT spacer sequence TTCN PAM
ccacuucucaucucccacgg

SEQ ID NO: 34936 - RNA, 20 nt, Artificial Sequence
  HTT spacer sequence TTCN PAM
uuucuccacuucucaucucc

SEQ ID NO: 34937 - RNA, 20 nt, Artificial Sequence
  HTT spacer sequence TTCN PAM
uuuuucuuggaagcaggaau

SEQ ID NO: 34938 - RNA, 20 nt, Artificial Sequence
  HTT spacer sequence TTCN PAM
uggaagcaggaauaacuuca

SEQ ID NO: 34939 - RNA, 20 nt, Artificial Sequence
  HTT spacer sequence TTCN PAM
aagaaaaaagaaauuccuuu

SEQ ID NO: 34940 - RNA, 20 nt, Artificial Sequence
  HTT spacer sequence TTCN PAM
ugcuuccaagaaaaaagaaa

SEQ ID NO: 34941 - RNA, 20 nt, Artificial Sequence
  HTT spacer sequence TTCN PAM
ugaagcauguauuucaacuu

SEQ ID NO: 34942 - RNA, 20 nt, Artificial Sequence
  HTT spacer sequence TTCN PAM
ugaaguuauuccugcuucca

SEQ ID NO: 34943 - RNA, 20 nt, Artificial Sequence
  HTT spacer sequence TTCN PAM
acuuaaacagauaguaggca

SEQ ID NO: 34944 - RNA, 20 nt, Artificial Sequence
  HTT spacer sequence TTCN PAM
gggcagacugggaggaaggg

SEQ ID NO: 34945 - RNA, 20 nt, Artificial Sequence
  HTT spacer sequence TTCN PAM
ucccagucugccccgaacac

SEQ ID NO: 34946 - RNA, 20 nt, Artificial Sequence
  HTT spacer sequence TTCN PAM
cucccuuccucccagucugc

SEQ ID NO: 34947 - RNA, 20 nt, Artificial Sequence
  HTT spacer sequence TTCN PAM
gccauuguuauggaauaaug

SEQ ID NO: 34948 - RNA, 20 nt, Artificial Sequence
  HTT spacer sequence TTCN PAM
auaacaauggcugaauuuau

SEQ ID NO: 34949 - RNA, 20 nt, Artificial Sequence
  HTT spacer sequence TTCN PAM
gcccguuucacuuaaaaguu

SEQ ID NO: 34950 - RNA, 20 nt, Artificial Sequence
  HTT spacer sequence TTCN PAM
cuuaaaaguugagacugcuu

SEQ ID NO: 34951 - RNA, 20 nt, Artificial Sequence
  HTT spacer sequence TTCN PAM
aauaacaaaaauauagagac

SEQ ID NO: 34952 - RNA, 20 nt, Artificial Sequence
  HTT spacer sequence TTCN PAM
auagugacgucuguuaugcu

SEQ ID NO: 34953 - RNA, 20 nt, Artificial Sequence
  HTT spacer sequence TTCN PAM
agaguuauugcagcaguuuc

SEQ ID NO: 34954 - RNA, 20 nt, Artificial Sequence
  HTT spacer sequence TTCN PAM
caugaacuaaucacaucaac

SEQ ID NO: 34955 - RNA, 20 nt, Artificial Sequence
  HTT spacer sequence TTCN PAM
ugagaaacugcugcaauaac

SEQ ID NO: 34956 - RNA, 20 nt, Artificial Sequence
  HTT spacer sequence TTCN PAM
ugaucggucuuacugacauu

SEQ ID NO: 34957 - RNA, 20 nt, Artificial Sequence
  HTT spacer sequence TTCN PAM
uagcaagccucauggauaag

SEQ ID NO: 34958 - RNA, 20 nt, Artificial Sequence
  HTT spacer sequence TTCN PAM
gugaaaagaaucucagcuua

SEQ ID NO: 34959 - RNA, 20 nt, Artificial Sequence
  HTT spacer sequence TTCN PAM
cagaagcacaauuucuuagc

SEQ ID NO: 34960 - RNA, 20 nt, Artificial Sequence
  HTT spacer sequence TTCN PAM
uuucacagaagcacaauuuc

SEQ ID NO: 34961 - RNA, 20 nt, Artificial Sequence
  HTT spacer sequence TTCN PAM
uggaguaagcugagauucuu

SEQ ID NO: 34962 - RNA, 20 nt, Artificial Sequence
  HTT spacer sequence TTCN PAM
gauuauuaaaguaauacacg

SEQ ID NO: 34963 - RNA, 20 nt, Artificial Sequence
  HTT spacer sequence TTCN PAM
gccaauuuaggaagacacaa

SEQ ID NO: 34964 - RNA, 20 nt, Artificial Sequence
  HTT spacer sequence TTCN PAM
uaaauuggcugaauuuuuuu

SEQ ID NO: 34965 - RNA, 20 nt, Artificial Sequence
  HTT spacer sequence TTCN PAM
ccacguuggccaggcuggua

SEQ ID NO: 34966 - RNA, 20 nt, Artificial Sequence
  HTT spacer sequence TTCN PAM
ccugccucagccuccugagu

SEQ ID NO: 34967 - RNA, 20 nt, Artificial Sequence
  HTT spacer sequence TTCN PAM
agcgauucuccugccucagc

SEQ ID NO: 34968 - RNA, 20 nt, Artificial Sequence
  HTT spacer sequence TTCN PAM
uuuuuuuuuuuuuuuuuuga

SEQ ID NO: 34969 - RNA, 20 nt, Artificial Sequence
  HTT spacer sequence TTCN PAM
uuucuuuuuuuuuuuuuuuu

SEQ ID NO: 34970 - RNA, 20 nt, Artificial Sequence
  HTT spacer sequence TTCN PAM
gauacauuaccaaugcaggu

SEQ ID NO: 34971 - RNA, 20 nt, Artificial Sequence
  HTT spacer sequence TTCN PAM
cuuaguauauauuaccaggu

SEQ ID NO: 34972 - RNA, 20 nt, Artificial Sequence
  HTT spacer sequence TTCN PAM
agcaauucuccugccucagc

SEQ ID NO: 34973 - RNA, 20 nt, Artificial Sequence
  HTT spacer sequence TTCN PAM
ccugccucagccuccugagu

SEQ ID NO: 34974 - RNA, 20 nt, Artificial Sequence
  HTT spacer sequence TTCN PAM
ccauguuggucaggcugguc

SEQ ID NO: 34975 - RNA, 20 nt, Artificial Sequence
  HTT spacer sequence TTCN PAM
uauuauaaaaauguaaggcc

SEQ ID NO: 34976 - RNA, 20 nt, Artificial Sequence
  HTT spacer sequence TTCN PAM
aaugucagcaacauaaauuc

SEQ ID NO: 34977 - RNA, 20 nt, Artificial Sequence
  HTT spacer sequence TTCN PAM
uuucuaaugucagcaacaua

SEQ ID NO: 34978 - RNA, 20 nt, Artificial Sequence
  HTT spacer sequence TTCN PAM
uggauauuaugguucuuuuc

SEQ ID NO: 34979 - RNA, 20 nt, Artificial Sequence
  HTT spacer sequence TTCN PAM
uggauucuuggauauuaugg

SEQ ID NO: 34980 - RNA, 20 nt, Artificial Sequence
  HTT spacer sequence TTCN PAM
ccaaagcaucacacuauaua

SEQ ID NO: 34981 - RNA, 20 nt, Artificial Sequence
  HTT spacer sequence TTCN PAM
cucaauauuacaauccagau

SEQ ID NO: 34982 - RNA, 20 nt, Artificial Sequence
  HTT spacer sequence TTCN PAM
gccuuuuuucacucaauauu

SEQ ID NO: 34983 - RNA, 20 nt, Artificial Sequence
  HTT spacer sequence TTCN PAM
guuaagaaaaauaauauuua

SEQ ID NO: 34984 - RNA, 20 nt, Artificial Sequence
  HTT spacer sequence TTCN PAM
uaacugaaauccgacuauac

SEQ ID NO: 34985 - RNA, 20 nt, Artificial Sequence
  HTT spacer sequence TTCN PAM
cacacuggcagauaaucacc

SEQ ID NO: 34986 - RNA, 20 nt, Artificial Sequence
  HTT spacer sequence TTCN PAM
ucuuuauauuuuucagauau

SEQ ID NO: 34987 - RNA, 20 nt, Artificial Sequence
  HTT spacer sequence TTCN PAM
uuauauuuuucagauauucu

SEQ ID NO: 34988 - RNA, 20 nt, Artificial Sequence
  HTT spacer sequence TTCN PAM
gauauucucaaauuuucuaa

SEQ ID NO: 34989 - RNA, 20 nt, Artificial Sequence
  HTT spacer sequence TTCN PAM
caaauuuucuaaaaugagca

SEQ ID NO: 34990 - RNA, 20 nt, Artificial Sequence
  HTT spacer sequence TTCN PAM
aaaaugagcaaguauaacuu

SEQ ID NO: 34991 - RNA, 20 nt, Artificial Sequence
  HTT spacer sequence TTCN PAM
gauaacaaaaguuauacuug

SEQ ID NO: 34992 - RNA, 20 nt, Artificial Sequence
  HTT spacer sequence TTCN PAM
aucucaaaaaauaaaaauaa

SEQ ID NO: 34993 - RNA, 20 nt, Artificial Sequence
  HTT spacer sequence TTCN PAM
uggguucaaaugauucucug

SEQ ID NO: 34994 - RNA, 20 nt, Artificial Sequence
  HTT spacer sequence TTCN PAM
aaugauucucuggccccagc

SEQ ID NO: 34995 - RNA, 20 nt, Artificial Sequence
  HTT spacer sequence TTCN PAM
cuggccccagccuccugagu

SEQ ID NO: 34996 - RNA, 20 nt, Artificial Sequence
  HTT spacer sequence TTCN PAM
agccacucaggaggcugggg

SEQ ID NO: 34997 - RNA, 20 nt, Artificial Sequence
  HTT spacer sequence TTCN PAM
ccagguuggucaggcugguc

SEQ ID NO: 34998 - RNA, 20 nt, Artificial Sequence
  HTT spacer sequence TTCN PAM
agaccagccugaccaaccug

SEQ ID NO: 34999 - RNA, 20 nt, Artificial Sequence
  HTT spacer sequence TTCN PAM
uuugucaaauaaaauaaaaa

SEQ ID NO: 35000 - RNA, 20 nt, Artificial Sequence
  HTT spacer sequence TTCN PAM
auguuauagaagacuaaaua

SEQ ID NO: 35001 - RNA, 20 nt, Artificial Sequence
  HTT spacer sequence TTCN PAM
auaacauggaaguauuucuu

SEQ ID NO: 35002 - RNA, 20 nt, Artificial Sequence
  HTT spacer sequence TTCN PAM
cuugauuuguucaaaauauc

SEQ ID NO: 35003 - RNA, 20 nt, Artificial Sequence
  HTT spacer sequence TTCN PAM
aaauaucguaaacuuugcuu

SEQ ID NO: 35004 - RNA, 20 nt, Artificial Sequence
  HTT spacer sequence TTCN PAM
aucccaagccuacaacagug

SEQ ID NO: 35005 - RNA, 20 nt, Artificial Sequence
  HTT spacer sequence TTCN PAM
ugcccuuaggguuucugcag

SEQ ID NO: 35006 - RNA, 20 nt, Artificial Sequence
  HTT spacer sequence TTCN PAM
gcaggcuggucagggagacg

SEQ ID NO: 35007 - RNA, 20 nt, Artificial Sequence
  HTT spacer sequence TTCN PAM
gccucucaacugccccugca

SEQ ID NO: 35008 - RNA, 20 nt, Artificial Sequence
  HTT spacer sequence TTCN PAM
agggugugggcagcacagga

SEQ ID NO: 35009 - RNA, 20 nt, Artificial Sequence
  HTT spacer sequence TTCN PAM
ugugcugcccacacccugga

SEQ ID NO: 35010 - RNA, 20 nt, Artificial Sequence
  HTT spacer sequence TTCN PAM
uugggauauaauugccauuc

SEQ ID NO: 35011 - RNA, 20 nt, Artificial Sequence
  HTT spacer sequence TTCN PAM
gauaacacguguuugaggug

SEQ ID NO: 35012 - RNA, 20 nt, Artificial Sequence
  HTT spacer sequence TTCN PAM
uacuuuagacaccucaaaca

SEQ ID NO: 35013 - RNA, 20 nt, Artificial Sequence
  HTT spacer sequence TTCN PAM
ucucauuguuuguacuuuuu

SEQ ID NO: 35014 - RNA, 20 nt, Artificial Sequence
  HTT spacer sequence TTCN PAM
cauuguuuguacuuuuuaua

SEQ ID NO: 35015 - RNA, 20 nt, Artificial Sequence
  HTT spacer sequence TTCN PAM
auaaaccuuugugguguuug

SEQ ID NO: 35016 - RNA, 20 nt, Artificial Sequence
  HTT spacer sequence TTCN PAM
uucuucucaguuuggaugcu

SEQ ID NO: 35017 - RNA, 20 nt, Artificial Sequence
  HTT spacer sequence TTCN PAM
ucucaguuuggaugcuguga

SEQ ID NO: 35018 - RNA, 20 nt, Artificial Sequence
  HTT spacer sequence TTCN PAM
caguuuggaugcugugaagc

SEQ ID NO: 35019 - RNA, 20 nt, Artificial Sequence
  HTT spacer sequence TTCN PAM
cagcauccaaacugagaaga

SEQ ID NO: 35020 - RNA, 20 nt, Artificial Sequence
  HTT spacer sequence TTCN PAM
uuccacugccuucccaguuu

SEQ ID NO: 35021 - RNA, 20 nt, Artificial Sequence
  HTT spacer sequence TTCN PAM
acugccuucccaguuugcau

SEQ ID NO: 35022 - RNA, 20 nt, Artificial Sequence
  HTT spacer sequence TTCN PAM
caguuugcauuuggaguuua

SEQ ID NO: 35023 - RNA, 20 nt, Artificial Sequence
  HTT spacer sequence TTCN PAM
ucaguauauauuaauaguug

SEQ ID NO: 35024 - RNA, 20 nt, Artificial Sequence
  HTT spacer sequence TTCN PAM
uucuuuuuaagucuuuuauc

SEQ ID NO: 35025 - RNA, 20 nt, Artificial Sequence
  HTT spacer sequence TTCN PAM
uuuuaagucuuuuaucaauu

SEQ ID NO: 35026 - RNA, 20 nt, Artificial Sequence
  HTT spacer sequence TTCN PAM
aaaaagccaaauugauaaaa

SEQ ID NO: 35027 - RNA, 20 nt, Artificial Sequence
  HTT spacer sequence TTCN PAM
aucagauauuuuuccaaaaa

SEQ ID NO: 35028 - RNA, 20 nt, Artificial Sequence
  HTT spacer sequence TTCN PAM
gcuauauuagcugugugaga

SEQ ID NO: 35029 - RNA, 20 nt, Artificial Sequence
  HTT spacer sequence TTCN PAM
cacagcuccugucacuaguc

SEQ ID NO: 35030 - RNA, 20 nt, Artificial Sequence
  HTT spacer sequence TTCN PAM
uuucccacagcuccugucac

SEQ ID NO: 35031 - RNA, 20 nt, Artificial Sequence
  HTT spacer sequence TTCN PAM
uaggcauugaugggaauuuc

SEQ ID NO: 35032 - RNA, 20 nt, Artificial Sequence
  HTT spacer sequence TTCN PAM
caucaaugccuaagaacauu

SEQ ID NO: 35033 - RNA, 20 nt, Artificial Sequence
  HTT spacer sequence TTCN PAM
ggguguggucuucaaguuca

SEQ ID NO: 35034 - RNA, 20 nt, Artificial Sequence
  HTT spacer sequence TTCN PAM
aguucauuuaagggaauuuu

SEQ ID NO: 35035 - RNA, 20 nt, Artificial Sequence
  HTT spacer sequence TTCN PAM
uuuaagggaauuuucauaug

SEQ ID NO: 35036 - RNA, 20 nt, Artificial Sequence
  HTT spacer sequence TTCN PAM
cuuaaaugaacuugaagacc

SEQ ID NO: 35037 - RNA, 20 nt, Artificial Sequence
  HTT spacer sequence TTCN PAM
uaugcuggcaaaaggcuuuu

SEQ ID NO: 35038 - RNA, 20 nt, Artificial Sequence
  HTT spacer sequence TTCN PAM
cauuagcuugacucuuucca

SEQ ID NO: 35039 - RNA, 20 nt, Artificial Sequence
  HTT spacer sequence TTCN PAM
aaaauuauuugcugugaauu

SEQ ID NO: 35040 - RNA, 20 nt, Artificial Sequence
  HTT spacer sequence TTCN PAM
cagcaaauaauuuuggaaag

SEQ ID NO: 35041 - RNA, 20 nt, Artificial Sequence
  HTT spacer sequence TTCN PAM
aauucacagcaaauaauuuu

SEQ ID NO: 35042 - RNA, 20 nt, Artificial Sequence
  HTT spacer sequence TTCN PAM
uaaacuucuaauucacagca

SEQ ID NO: 35043 - RNA, 20 nt, Artificial Sequence
  HTT spacer sequence TTCN PAM
cuuaauugugaccuagcaua

SEQ ID NO: 35044 - RNA, 20 nt, Artificial Sequence
  HTT spacer sequence TTCN PAM
uaugcuaggucacaauuaag

SEQ ID NO: 35045 - RNA, 20 nt, Artificial Sequence
  HTT spacer sequence TTCN PAM
uaaaucaucaccauuucgua

SEQ ID NO: 35046 - RNA, 20 nt, Artificial Sequence
  HTT spacer sequence TTCN PAM
uguauuaacagcuuuuauuu

SEQ ID NO: 35047 - RNA, 20 nt, Artificial Sequence
  HTT spacer sequence TTCN PAM
uccaguagauggcccuacua

SEQ ID NO: 35048 - RNA, 20 nt, Artificial Sequence
  HTT spacer sequence TTCN PAM
cagaugcuaguagggccauc

SEQ ID NO: 35049 - RNA, 20 nt, Artificial Sequence
  HTT spacer sequence TTCN PAM
agucuucuccagcauucagg

SEQ ID NO: 35050 - RNA, 20 nt, Artificial Sequence
  HTT spacer sequence TTCN PAM
ccagcauucaggaauaggcu

SEQ ID NO: 35051 - RNA, 20 nt, Artificial Sequence
  HTT spacer sequence TTCN PAM
ggaauaggcuuucauuuugu

SEQ ID NO: 35052 - RNA, 20 nt, Artificial Sequence
  HTT spacer sequence TTCN PAM
ugaaugcuggagaagacuug

SEQ ID NO: 35053 - RNA, 20 nt, Artificial Sequence
  HTT spacer sequence TTCN PAM
uuuuguguaucaauuacuga

SEQ ID NO: 35054 - RNA, 20 nt, Artificial Sequence
  HTT spacer sequence TTCN PAM
caguaauugauacacaaaau

SEQ ID NO: 35055 - RNA, 20 nt, Artificial Sequence
  HTT spacer sequence TTCN PAM
caaaugugaugugagucacc

SEQ ID NO: 35056 - RNA, 20 nt, Artificial Sequence
  HTT spacer sequence TTCN PAM
ugugugugucagcaaaugac

SEQ ID NO: 35057 - RNA, 20 nt, Artificial Sequence
  HTT spacer sequence TTCN PAM
agcaaauaucaguuggucau

SEQ ID NO: 35058 - RNA, 20 nt, Artificial Sequence
  HTT spacer sequence TTCN PAM
agagcagauaauguaaucca

SEQ ID NO: 35059 - RNA, 20 nt, Artificial Sequence
  HTT spacer sequence TTCN PAM
caccuuccucacauacagac

SEQ ID NO: 35060 - RNA, 20 nt, Artificial Sequence
  HTT spacer sequence TTCN PAM
ucacauacagacugagcagc

SEQ ID NO: 35061 - RNA, 20 nt, Artificial Sequence
  HTT spacer sequence TTCN PAM
aaucauaggucuggcacuag

SEQ ID NO: 35062 - RNA, 20 nt, Artificial Sequence
  HTT spacer sequence TTCN PAM
cuucugggcaacuuuggcau

SEQ ID NO: 35063 - RNA, 20 nt, Artificial Sequence
  HTT spacer sequence TTCN PAM
gggcaacuuuggcauuggag

SEQ ID NO: 35064 - RNA, 20 nt, Artificial Sequence
  HTT spacer sequence TTCN PAM
uuaaauuaauacauuuuacu

SEQ ID NO: 35065 - RNA, 20 nt, Artificial Sequence
  HTT spacer sequence TTCN PAM
aguaaacauacaguucuaau

SEQ ID NO: 35066 - RNA, 20 nt, Artificial Sequence
  HTT spacer sequence TTCN PAM
aauacuuuuuacaauuuaaa

SEQ ID NO: 35067 - RNA, 20 nt, Artificial Sequence
  HTT spacer sequence TTCN PAM
uuuuuauuuuaucauuuaaa

SEQ ID NO: 35068 - RNA, 20 nt, Artificial Sequence
  HTT spacer sequence TTCN PAM
gcaucuguucacaagggguu

SEQ ID NO: 35069 - RNA, 20 nt, Artificial Sequence
  HTT spacer sequence TTCN PAM
caagggguugauauuuauga

SEQ ID NO: 35070 - RNA, 20 nt, Artificial Sequence
  HTT spacer sequence TTCN PAM
auucuccauauccauucuau

SEQ ID NO: 35071 - RNA, 20 nt, Artificial Sequence
  HTT spacer sequence TTCN PAM
ccauauccauucuauguucu

SEQ ID NO: 35072 - RNA, 20 nt, Artificial Sequence
  HTT spacer sequence TTCN PAM
auguucucuuaaugcucagu

SEQ ID NO: 35073 - RNA, 20 nt, Artificial Sequence
  HTT spacer sequence TTCN PAM
cuuaaugcucagucagcacc

SEQ ID NO: 35074 - RNA, 20 nt, Artificial Sequence
  HTT spacer sequence TTCN PAM
augcuugguaguuugacuua

SEQ ID NO: 35075 - RNA, 20 nt, Artificial Sequence
  HTT spacer sequence TTCN PAM
aggggauugagcccugggua

SEQ ID NO: 35076 - RNA, 20 nt, Artificial Sequence
  HTT spacer sequence TTCN PAM
auaacuuuuacuacaagaua

SEQ ID NO: 35077 - RNA, 20 nt, Artificial Sequence
  HTT spacer sequence TTCN PAM
ccaaugguauccuuuaacac

SEQ ID NO: 35078 - RNA, 20 nt, Artificial Sequence
  HTT spacer sequence TTCN PAM
ugauauuauuauguugguuc

SEQ ID NO: 35079 - RNA, 20 nt, Artificial Sequence
  HTT spacer sequence TTCN PAM
auaguaauaaagaguucacc

SEQ ID NO: 35080 - RNA, 20 nt, Artificial Sequence
  HTT spacer sequence TTCN PAM
ccccagccaauucucuuuua

SEQ ID NO: 35081 - RNA, 20 nt, Artificial Sequence
  HTT spacer sequence TTCN PAM
cuuuuauuuugugccuguuu

SEQ ID NO: 35082 - RNA, 20 nt, Artificial Sequence
  HTT spacer sequence TTCN PAM
gcagaaccauugucauaugc

SEQ ID NO: 35083 - RNA, 20 nt, Artificial Sequence
  HTT spacer sequence TTCN PAM
gcugaacuggagaugagaca

SEQ ID NO: 35084 - RNA, 20 nt, Artificial Sequence
  HTT spacer sequence TTCN PAM
uucauuggacacuuaggccc

SEQ ID NO: 35085 - RNA, 20 nt, Artificial Sequence
  HTT spacer sequence TTCN PAM
uuggacacuuaggccccaau

SEQ ID NO: 35086 - RNA, 20 nt, Artificial Sequence
  HTT spacer sequence TTCN PAM
uucagaucuacuaccugauu

SEQ ID NO: 35087 - RNA, 20 nt, Artificial Sequence
  HTT spacer sequence TTCN PAM
gaucuacuaccugauuucau

SEQ ID NO: 35088 - RNA, 20 nt, Artificial Sequence
  HTT spacer sequence TTCN PAM
uuucucaaaugauuuuuaug

SEQ ID NO: 35089 - RNA, 20 nt, Artificial Sequence
  HTT spacer sequence TTCN PAM
caaaugauuuuuauggagcu

SEQ ID NO: 35090 - RNA, 20 nt, Artificial Sequence
  HTT spacer sequence TTCN PAM
uauaaaucagagcuccauaa

SEQ ID NO: 35091 - RNA, 20 nt, Artificial Sequence
  HTT spacer sequence TTCN PAM
gagcugguauaaaauguauu

SEQ ID NO: 35092 - RNA, 20 nt, Artificial Sequence
  HTT spacer sequence TTCN PAM
ucuuggaauugcaagagaaa

SEQ ID NO: 35093 - RNA, 20 nt, Artificial Sequence
  HTT spacer sequence TTCN PAM
aagaggaaggcaugucacaa

SEQ ID NO: 35094 - RNA, 20 nt, Artificial Sequence
  HTT spacer sequence TTCN PAM
cuugcaauuccaagaggaag

SEQ ID NO: 35095 - RNA, 20 nt, Artificial Sequence
  HTT spacer sequence TTCN PAM
uuucucuugcaauuccaaga

SEQ ID NO: 35096 - RNA, 20 nt, Artificial Sequence
  HTT spacer sequence TTCN PAM
agagugccuccacugagugc

SEQ ID NO: 35097 - RNA, 20 nt, Artificial Sequence
  HTT spacer sequence TTCN PAM
uagacucaucugaggcacuc

SEQ ID NO: 35098 - RNA, 20 nt, Artificial Sequence
  HTT spacer sequence TTCN PAM
gacccugcucucgucagcuu

SEQ ID NO: 35099 - RNA, 20 nt, Artificial Sequence
  HTT spacer sequence TTCN PAM
cauuggaucucucagcccau

SEQ ID NO: 35100 - RNA, 20 nt, Artificial Sequence
  HTT spacer sequence TTCN PAM
ggccaaaaucaaagcaucuu

SEQ ID NO: 35101 - RNA, 20 nt, Artificial Sequence
  HTT spacer sequence TTCN PAM
acucaguaccaguaccugca

SEQ ID NO: 35102 - RNA, 20 nt, Artificial Sequence
  HTT spacer sequence TTCN PAM
uuagggggaauggggguggu

SEQ ID NO: 35103 - RNA, 20 nt, Artificial Sequence
  HTT spacer sequence TTCN PAM
cccuaaggaaaucaaaaucc

SEQ ID NO: 35104 - RNA, 20 nt, Artificial Sequence
  HTT spacer sequence TTCN PAM
ccucauaugcucaccacccc

SEQ ID NO: 35105 - RNA, 20 nt, Artificial Sequence
  HTT spacer sequence TTCN PAM
gauguuaccuauaugcauaa

SEQ ID NO: 35106 - RNA, 20 nt, Artificial Sequence
  HTT spacer sequence TTCN PAM
gugcugaguauuuuaaagua

SEQ ID NO: 35107 - RNA, 20 nt, Artificial Sequence
  HTT spacer sequence TTCN PAM
caauauagccccucaguuaa

SEQ ID NO: 35108 - RNA, 20 nt, Artificial Sequence
  HTT spacer sequence TTCN PAM
aaaugaguuuacuuguaguu

SEQ ID NO: 35109 - RNA, 20 nt, Artificial Sequence
  HTT spacer sequence TTCN PAM
uuuuaaugggcaccauaugc

SEQ ID NO: 35110 - RNA, 20 nt, Artificial Sequence
  HTT spacer sequence TTCN PAM
uaacaucccagugcccgagg

SEQ ID NO: 35111 - RNA, 20 nt, Artificial Sequence
  HTT spacer sequence TTCN PAM
uucucaaguuaguuuuagau

SEQ ID NO: 35112 - RNA, 20 nt, Artificial Sequence
  HTT spacer sequence TTCN PAM
caaguuaguuuuagauuaga

SEQ ID NO: 35113 - RNA, 20 nt, Artificial Sequence
  HTT spacer sequence TTCN PAM
uaccagcccauaaaucugcc

SEQ ID NO: 35114 - RNA, 20 nt, Artificial Sequence
  HTT spacer sequence TTCN PAM
uugcuggccacauccuccau

SEQ ID NO: 35115 - RNA, 20 nt, Artificial Sequence
  HTT spacer sequence TTCN PAM
auggacuccgucuuccuugc

SEQ ID NO: 35116 - RNA, 20 nt, Artificial Sequence
  HTT spacer sequence TTCN PAM
cccaaaaucaauuucaaugg

SEQ ID NO: 35117 - RNA, 20 nt, Artificial Sequence
  HTT spacer sequence TTCN PAM
uggagauuggcaacuucucc

SEQ ID NO: 35118 - RNA, 20 nt, Artificial Sequence
  HTT spacer sequence TTCN PAM
uucauggagauuggcaacuu

SEQ ID NO: 35119 - RNA, 20 nt, Artificial Sequence
  HTT spacer sequence TTCN PAM
gggggcuauaggagaguuuc

SEQ ID NO: 35120 - RNA, 20 nt, Artificial Sequence
  HTT spacer sequence TTCN PAM
ugaaagggacuaaaagauga

SEQ ID NO: 35121 - RNA, 20 nt, Artificial Sequence
  HTT spacer sequence TTCN PAM
cgaaacucuccuauagcccc

SEQ ID NO: 35122 - RNA, 20 nt, Artificial Sequence
  HTT spacer sequence TTCN PAM
uccaacuugaacaugggcug

SEQ ID NO: 35123 - RNA, 20 nt, Artificial Sequence
  HTT spacer sequence TTCN PAM
aguuggaugaaugaucuuau

SEQ ID NO: 35124 - RNA, 20 nt, Artificial Sequence
  HTT spacer sequence TTCN PAM
ccuccagcccauguucaagu

SEQ ID NO: 35125 - RNA, 20 nt, Artificial Sequence
  HTT spacer sequence TTCN PAM
cuacagucccaaagccauua

SEQ ID NO: 35126 - RNA, 20 nt, Artificial Sequence
  HTT spacer sequence TTCN PAM
cuuacaaucagugucuuccc

SEQ ID NO: 35127 - RNA, 20 nt, Artificial Sequence
  HTT spacer sequence TTCN PAM
uucucuuacaaucagugucu

SEQ ID NO: 35128 - RNA, 20 nt, Artificial Sequence
  HTT spacer sequence TTCN PAM
gccuccuucauucucuuaca

SEQ ID NO: 35129 - RNA, 20 nt, Artificial Sequence
  HTT spacer sequence TTCN PAM
ccaacugaacuucgguugug

SEQ ID NO: 35130 - RNA, 20 nt, Artificial Sequence
  HTT spacer sequence TTCN PAM
guuggugaaccaggccuggc

SEQ ID NO: 35131 - RNA, 20 nt, Artificial Sequence
  HTT spacer sequence TTCN PAM
guugugaagacaaagaaacc

SEQ ID NO: 35132 - RNA, 20 nt, Artificial Sequence
  HTT spacer sequence TTCN PAM
caaccgaaguucaguuggug

SEQ ID NO: 35133 - RNA, 20 nt, Artificial Sequence
  HTT spacer sequence TTCN PAM
uugucuucacaaccgaaguu

SEQ ID NO: 35134 - RNA, 20 nt, Artificial Sequence
  HTT spacer sequence TTCN PAM
cauccugggcaggugugugg

SEQ ID NO: 35135 - RNA, 20 nt, Artificial Sequence
  HTT spacer sequence TTCN PAM
augacugucaccaccacaca

SEQ ID NO: 35136 - RNA, 20 nt, Artificial Sequence
  HTT spacer sequence TTCN PAM
caauuuccaugacugucacc

SEQ ID NO: 35137 - RNA, 20 nt, Artificial Sequence
  HTT spacer sequence TTCN PAM
cgcacaaaucuguguuccca

SEQ ID NO: 35138 - RNA, 20 nt, Artificial Sequence
  HTT spacer sequence TTCN PAM
guuugaguuuggcuuaucag

SEQ ID NO: 35139 - RNA, 20 nt, Artificial Sequence
  HTT spacer sequence TTCN PAM
acugauaagccaaacucaaa

SEQ ID NO: 35140 - RNA, 20 nt, Artificial Sequence
  HTT spacer sequence TTCN PAM
guuccccaagcaauuugucc

SEQ ID NO: 35141 - RNA, 20 nt, Artificial Sequence
  HTT spacer sequence TTCN PAM
ccaagcaauuuguccuuccc

SEQ ID NO: 35142 - RNA, 20 nt, Artificial Sequence
  HTT spacer sequence TTCN PAM
caugcuauugggguggagag

SEQ ID NO: 35143 - RNA, 20 nt, Artificial Sequence
  HTT spacer sequence TTCN PAM
cagagauuugggagcacugg

SEQ ID NO: 35144 - RNA, 20 nt, Artificial Sequence
  HTT spacer sequence TTCN PAM
ugggccucugaagaagaagc

SEQ ID NO: 35145 - RNA, 20 nt, Artificial Sequence
  HTT spacer sequence TTCN PAM
gaggcccaugaacuucucag

SEQ ID NO: 35146 - RNA, 20 nt, Artificial Sequence
  HTT spacer sequence TTCN PAM
ucagaggcccaugaacuucu

SEQ ID NO: 35147 - RNA, 20 nt, Artificial Sequence
  HTT spacer sequence TTCN PAM
ucuucagaggcccaugaacu

SEQ ID NO: 35148 - RNA, 20 nt, Artificial Sequence
  HTT spacer sequence TTCN PAM
cucaccugcugaaggugauu

SEQ ID NO: 35149 - RNA, 20 nt, Artificial Sequence
  HTT spacer sequence TTCN PAM
gcaggugagagaagagcugc

SEQ ID NO: 35150 - RNA, 20 nt, Artificial Sequence
  HTT spacer sequence TTCN PAM
uacagccuuaaugacuaugg

SEQ ID NO: 35151 - RNA, 20 nt, Artificial Sequence
  HTT spacer sequence TTCN PAM
agacuaccuuuguuuaguaa

SEQ ID NO: 35152 - RNA, 20 nt, Artificial Sequence
  HTT spacer sequence TTCN PAM
uuauucucuuuuugcuuuaa

SEQ ID NO: 35153 - RNA, 20 nt, Artificial Sequence
  HTT spacer sequence TTCN PAM
cuuuuugcuuuaaaugaaca

SEQ ID NO: 35154 - RNA, 20 nt, Artificial Sequence
  HTT spacer sequence TTCN PAM
uuuaaagcaaaaagagaaua

SEQ ID NO: 35155 - RNA, 20 nt, Artificial Sequence
  HTT spacer sequence TTCN PAM
agcacuuugggagacugagg

SEQ ID NO: 35156 - RNA, 20 nt, Artificial Sequence
  HTT spacer sequence TTCN PAM
agaccagccugggcaacauc

SEQ ID NO: 35157 - RNA, 20 nt, Artificial Sequence
  HTT spacer sequence TTCN PAM
ugauguugcccaggcugguc

SEQ ID NO: 35158 - RNA, 20 nt, Artificial Sequence
  HTT spacer sequence TTCN PAM
cuguguuagccaggaugguc

SEQ ID NO: 35159 - RNA, 20 nt, Artificial Sequence
  HTT spacer sequence TTCN PAM
ccugccucagccucccgagc

SEQ ID NO: 35160 - RNA, 20 nt, Artificial Sequence
  HTT spacer sequence TTCN PAM
cgccauucuccugccucagc

SEQ ID NO: 35161 - RNA, 20 nt, Artificial Sequence
  HTT spacer sequence TTCN PAM
agcaacucucuugccucagc

SEQ ID NO: 35162 - RNA, 20 nt, Artificial Sequence
  HTT spacer sequence TTCN PAM
aaaagaagaaaaaaauguga

SEQ ID NO: 35163 - RNA, 20 nt, Artificial Sequence
  HTT spacer sequence TTCN PAM
uuuggaaagagucugacucu

SEQ ID NO: 35164 - RNA, 20 nt, Artificial Sequence
  HTT spacer sequence TTCN PAM
ucuuuuggaaagagucugac

SEQ ID NO: 35165 - RNA, 20 nt, Artificial Sequence
  HTT spacer sequence TTCN PAM
cucuuagggauaacagugac

SEQ ID NO: 35166 - RNA, 20 nt, Artificial Sequence
  HTT spacer sequence TTCN PAM
agcauuagccaagaaagcuc

SEQ ID NO: 35167 - RNA, 20 nt, Artificial Sequence
  HTT spacer sequence TTCN PAM
uggcuaaugcuggaaaccua

SEQ ID NO: 35168 - RNA, 20 nt, Artificial Sequence
  HTT spacer sequence TTCN PAM
gagcuuucuuggcuaaugcu

SEQ ID NO: 35169 - RNA, 20 nt, Artificial Sequence
  HTT spacer sequence TTCN PAM
uggccaaguaccucauugcu

SEQ ID NO: 35170 - RNA, 20 nt, Artificial Sequence
  HTT spacer sequence TTCN PAM
augguuguagaauguucugc

SEQ ID NO: 35171 - RNA, 20 nt, Artificial Sequence
  HTT spacer sequence TTCN PAM
acaaccauggaaaugcucca

SEQ ID NO: 35172 - RNA, 20 nt, Artificial Sequence
  HTT spacer sequence TTCN PAM
gccaaucucagggacaguuu

SEQ ID NO: 35173 - RNA, 20 nt, Artificial Sequence
  HTT spacer sequence TTCN PAM
gugaagcaauaaaaucaacu

SEQ ID NO: 35174 - RNA, 20 nt, Artificial Sequence
  HTT spacer sequence TTCN PAM
cagaaaagcaaaacuguccc

SEQ ID NO: 35175 - RNA, 20 nt, Artificial Sequence
  HTT spacer sequence TTCN PAM
aaacaaauguuaacuauuug

SEQ ID NO: 35176 - RNA, 20 nt, Artificial Sequence
  HTT spacer sequence TTCN PAM
cauacuuuuuuuuuuuuuuu

SEQ ID NO: 35177 - RNA, 20 nt, Artificial Sequence
  HTT spacer sequence TTCN PAM
uucuuguugccugggcugga

SEQ ID NO: 35178 - RNA, 20 nt, Artificial Sequence
  HTT spacer sequence TTCN PAM
uguugccugggcuggagugc

SEQ ID NO: 35179 - RNA, 20 nt, Artificial Sequence
  HTT spacer sequence TTCN PAM
gccuccuggguucaaacgau

SEQ ID NO: 35180 - RNA, 20 nt, Artificial Sequence
  HTT spacer sequence TTCN PAM
aacgauucuucugccucagc

SEQ ID NO: 35181 - RNA, 20 nt, Artificial Sequence
  HTT spacer sequence TTCN PAM
ucugccucagccucucgagg

SEQ ID NO: 35182 - RNA, 20 nt, Artificial Sequence
  HTT spacer sequence TTCN PAM
gccucagccucucgaggcag

SEQ ID NO: 35183 - RNA, 20 nt, Artificial Sequence
  HTT spacer sequence TTCN PAM
ccauguuggucagguugguc

SEQ ID NO: 35184 - RNA, 20 nt, Artificial Sequence
  HTT spacer sequence TTCN PAM
ggucaggaguuugagaccaa

SEQ ID NO: 35185 - RNA, 20 nt, Artificial Sequence
  HTT spacer sequence TTCN PAM
gccucccaaaguguugggau

SEQ ID NO: 35186 - RNA, 20 nt, Artificial Sequence
  HTT spacer sequence TTCN PAM
cuuacuguuuauaucugauu

SEQ ID NO: 35187 - RNA, 20 nt, Artificial Sequence
  HTT spacer sequence TTCN PAM
accuuuaaaaaucucccuac

SEQ ID NO: 35188 - RNA, 20 nt, Artificial Sequence
  HTT spacer sequence TTCN PAM
cauucuccuuuagcugccau

SEQ ID NO: 35189 - RNA, 20 nt, Artificial Sequence
  HTT spacer sequence TTCN PAM
ccuuuagcugccaucagucu

SEQ ID NO: 35190 - RNA, 20 nt, Artificial Sequence
  HTT spacer sequence TTCN PAM
cccuucucugcaaacaucuc

SEQ ID NO: 35191 - RNA, 20 nt, Artificial Sequence
  HTT spacer sequence TTCN PAM
cugcaaacaucucuggagag

SEQ ID NO: 35192 - RNA, 20 nt, Artificial Sequence
  HTT spacer sequence TTCN PAM
cacugcucugagguggaccu

SEQ ID NO: 35193 - RNA, 20 nt, Artificial Sequence
  HTT spacer sequence TTCN PAM
uuggcucucuuggccuggac

SEQ ID NO: 35194 - RNA, 20 nt, Artificial Sequence
  HTT spacer sequence TTCN PAM
gccauccuuccuuaaccccu

SEQ ID NO: 35195 - RNA, 20 nt, Artificial Sequence
  HTT spacer sequence TTCN PAM
uuaaccccugcuggugguuu

SEQ ID NO: 35196 - RNA, 20 nt, Artificial Sequence
  HTT spacer sequence TTCN PAM
guugccacacuccauagcag

SEQ ID NO: 35197 - RNA, 20 nt, Artificial Sequence
  HTT spacer sequence TTCN PAM
cgcccagaucaugucuuuac

SEQ ID NO: 35198 - RNA, 20 nt, Artificial Sequence
  HTT spacer sequence TTCN PAM
cucuuuguauccugcaggcu

SEQ ID NO: 35199 - RNA, 20 nt, Artificial Sequence
  HTT spacer sequence TTCN PAM
guuggcuuucagagggccuc

SEQ ID NO: 35200 - RNA, 20 nt, Artificial Sequence
  HTT spacer sequence TTCN PAM
gagggccuccuggguguucc

SEQ ID NO: 35201 - RNA, 20 nt, Artificial Sequence
  HTT spacer sequence TTCN PAM
cuuacccacuugccacuccc

SEQ ID NO: 35202 - RNA, 20 nt, Artificial Sequence
  HTT spacer sequence TTCN PAM
guccuuccugcccaccagca

SEQ ID NO: 35203 - RNA, 20 nt, Artificial Sequence
  HTT spacer sequence TTCN PAM
ugcccaccagcacaugcuuu

SEQ ID NO: 35204 - RNA, 20 nt, Artificial Sequence
  HTT spacer sequence TTCN PAM
aggcucuguccuaggccguc

SEQ ID NO: 35205 - RNA, 20 nt, Artificial Sequence
  HTT spacer sequence TTCN PAM
cucuuuguagucucugggcc

SEQ ID NO: 35206 - RNA, 20 nt, Artificial Sequence
  HTT spacer sequence TTCN PAM
agagaguggcagaauuuucu

SEQ ID NO: 35207 - RNA, 20 nt, Artificial Sequence
  HTT spacer sequence TTCN PAM
gccacucucuagaacagcac

SEQ ID NO: 35208 - RNA, 20 nt, Artificial Sequence
  HTT spacer sequence TTCN PAM
auaaccauggcagugcucca

SEQ ID NO: 35209 - RNA, 20 nt, Artificial Sequence
  HTT spacer sequence TTCN PAM
agggcucaacagcuauaugu

SEQ ID NO: 35210 - RNA, 20 nt, Artificial Sequence
  HTT spacer sequence TTCN PAM
gucacacuagcugcauuuca

SEQ ID NO: 35211 - RNA, 20 nt, Artificial Sequence
  HTT spacer sequence TTCN PAM
ucagucacacuagcugcauu

SEQ ID NO: 35212 - RNA, 20 nt, Artificial Sequence
  HTT spacer sequence TTCN PAM
guucuucagucacacuagcu

SEQ ID NO: 35213 - RNA, 20 nt, Artificial Sequence
  HTT spacer sequence TTCN PAM
guuuaauuuucauuaaauuu

SEQ ID NO: 35214 - RNA, 20 nt, Artificial Sequence
  HTT spacer sequence TTCN PAM
uuaaauuuaaauuuaaauaa

SEQ ID NO: 35215 - RNA, 20 nt, Artificial Sequence
  HTT spacer sequence TTCN PAM
ccugucuucagugucuagau

SEQ ID NO: 35216 - RNA, 20 nt, Artificial Sequence
  HTT spacer sequence TTCN PAM
gugucuagaugagggaccuc

SEQ ID NO: 35217 - RNA, 20 nt, Artificial Sequence
  HTT spacer sequence TTCN PAM
auguagccagcugccccgug

SEQ ID NO: 35218 - RNA, 20 nt, Artificial Sequence
  HTT spacer sequence TTCN PAM
guccuccuccccacaucugc

SEQ ID NO: 35219 - RNA, 20 nt, Artificial Sequence
  HTT spacer sequence TTCN PAM
agcuugauaagacacaaagu

SEQ ID NO: 35220 - RNA, 20 nt, Artificial Sequence
  HTT spacer sequence TTCN PAM
uuuccacucaccaagucuuu

SEQ ID NO: 35221 - RNA, 20 nt, Artificial Sequence
  HTT spacer sequence TTCN PAM
acucaccaagucuuuuguuu

SEQ ID NO: 35222 - RNA, 20 nt, Artificial Sequence
  HTT spacer sequence TTCN PAM
ccuacuaaauauuuugcgag

SEQ ID NO: 35223 - RNA, 20 nt, Artificial Sequence
  HTT spacer sequence TTCN PAM
cgcaaaauauuuaguagggg

SEQ ID NO: 35224 - RNA, 20 nt, Artificial Sequence
  HTT spacer sequence TTCN PAM
ucucgcaaaauauuuaguag

SEQ ID NO: 35225 - RNA, 20 nt, Artificial Sequence
  HTT spacer sequence TTCN PAM
cauacauguacaugcacaua

SEQ ID NO: 35226 - RNA, 20 nt, Artificial Sequence
  HTT spacer sequence TTCN PAM
agaacuuugggaggccgaga

SEQ ID NO: 35227 - RNA, 20 nt, Artificial Sequence
  HTT spacer sequence TTCN PAM
ggaauuacaggcgugagcca

SEQ ID NO: 35228 - RNA, 20 nt, Artificial Sequence
  HTT spacer sequence TTCN PAM
ggcucacacggugaaacccc

SEQ ID NO: 35229 - RNA, 20 nt, Artificial Sequence
  HTT spacer sequence TTCN PAM
ccgugugagccggaaugguc

SEQ ID NO: 35230 - RNA, 20 nt, Artificial Sequence
  HTT spacer sequence TTCN PAM
ccugcaucagccucccaggu

SEQ ID NO: 35231 - RNA, 20 nt, Artificial Sequence
  HTT spacer sequence TTCN PAM
cgccguucuccugcaucagc

SEQ ID NO: 35232 - RNA, 20 nt, Artificial Sequence
  HTT spacer sequence TTCN PAM
ugugcagccugguuuuuuuu

SEQ ID NO: 35233 - RNA, 20 nt, Artificial Sequence
  HTT spacer sequence TTCN PAM
uccugugcagccugguuuuu

SEQ ID NO: 35234 - RNA, 20 nt, Artificial Sequence
  HTT spacer sequence TTCN PAM
cauaggagcguguaugaguu

SEQ ID NO: 35235 - RNA, 20 nt, Artificial Sequence
  HTT spacer sequence TTCN PAM
uucucacacuucuguaaaga

SEQ ID NO: 35236 - RNA, 20 nt, Artificial Sequence
  HTT spacer sequence TTCN PAM
cacacuucuguaaagacaua

SEQ ID NO: 35237 - RNA, 20 nt, Artificial Sequence
  HTT spacer sequence TTCN PAM
guaaagacauaccugagaca

SEQ ID NO: 35238 - RNA, 20 nt, Artificial Sequence
  HTT spacer sequence TTCN PAM
uuauaugucucagguauguc

SEQ ID NO: 35239 - RNA, 20 nt, Artificial Sequence
  HTT spacer sequence TTCN PAM
gcaggcuguacaggcuucug

SEQ ID NO: 35240 - RNA, 20 nt, Artificial Sequence
  HTT spacer sequence TTCN PAM
guuucugggaaggccucagg

SEQ ID NO: 35241 - RNA, 20 nt, Artificial Sequence
  HTT spacer sequence TTCN PAM
gggaaggccucaggaaacuu

SEQ ID NO: 35242 - RNA, 20 nt, Artificial Sequence
  HTT spacer sequence TTCN PAM
cagaaacagaagccuguaca

SEQ ID NO: 35243 - RNA, 20 nt, Artificial Sequence
  HTT spacer sequence TTCN PAM
ugaggccuucccagaaacag

SEQ ID NO: 35244 - RNA, 20 nt, Artificial Sequence
  HTT spacer sequence TTCN PAM
gccaugacugcaaguuuccu

SEQ ID NO: 35245 - RNA, 20 nt, Artificial Sequence
  HTT spacer sequence TTCN PAM
ccuucugccaugacugcaag

SEQ ID NO: 35246 - RNA, 20 nt, Artificial Sequence
  HTT spacer sequence TTCN PAM
ccuucaccuucugccaugac

SEQ ID NO: 35247 - RNA, 20 nt, Artificial Sequence
  HTT spacer sequence TTCN PAM
cauggcccacaggaaaaaga

SEQ ID NO: 35248 - RNA, 20 nt, Artificial Sequence
  HTT spacer sequence TTCN PAM
ugugggccaugugaagaugu

SEQ ID NO: 35249 - RNA, 20 nt, Artificial Sequence
  HTT spacer sequence TTCN PAM
cucuuuuuccugugggccau

SEQ ID NO: 35250 - RNA, 20 nt, Artificial Sequence
  HTT spacer sequence TTCN PAM
cucucucucucugucucucu

SEQ ID NO: 35251 - RNA, 20 nt, Artificial Sequence
  HTT spacer sequence TTCN PAM
uuuucucucucucucucugu

SEQ ID NO: 35252 - RNA, 20 nt, Artificial Sequence
  HTT spacer sequence TTCN PAM
cccuccucucucccucucaa

SEQ ID NO: 35253 - RNA, 20 nt, Artificial Sequence
  HTT spacer sequence TTCN PAM
aaugguugagcaccaucccc

SEQ ID NO: 35254 - RNA, 20 nt, Artificial Sequence
  HTT spacer sequence TTCN PAM
gcaugagauuugggugggga

SEQ ID NO: 35255 - RNA, 20 nt, Artificial Sequence
  HTT spacer sequence TTCN PAM
ugcucugauaugguuuggcu

SEQ ID NO: 35256 - RNA, 20 nt, Artificial Sequence
  HTT spacer sequence TTCN PAM
caauaggguucaugcucuga

SEQ ID NO: 35257 - RNA, 20 nt, Artificial Sequence
  HTT spacer sequence TTCN PAM
cauaaggagcaugcaaccua

SEQ ID NO: 35258 - RNA, 20 nt, Artificial Sequence
  HTT spacer sequence TTCN PAM
accucaaaucaucaucaggc

SEQ ID NO: 35259 - RNA, 20 nt, Artificial Sequence
  HTT spacer sequence TTCN PAM
ucccgaaaccaucccccgcc

SEQ ID NO: 35260 - RNA, 20 nt, Artificial Sequence
  HTT spacer sequence TTCN PAM
ggaugaaacuguuccaccuc

SEQ ID NO: 35261 - RNA, 20 nt, Artificial Sequence
  HTT spacer sequence TTCN PAM
acaaaccaggguuggcgggg

SEQ ID NO: 35262 - RNA, 20 nt, Artificial Sequence
  HTT spacer sequence TTCN PAM
acagaaccggucccuggugc

SEQ ID NO: 35263 - RNA, 20 nt, Artificial Sequence
  HTT spacer sequence TTCN PAM
guggaagacaauuuuuccac

SEQ ID NO: 35264 - RNA, 20 nt, Artificial Sequence
  HTT spacer sequence TTCN PAM
cugccacuucugguccagac

SEQ ID NO: 35265 - RNA, 20 nt, Artificial Sequence
  HTT spacer sequence TTCN PAM
gguccagacugauauacuau

SEQ ID NO: 35266 - RNA, 20 nt, Artificial Sequence
  HTT spacer sequence TTCN PAM
aaaacaaaaggcuagugcag

SEQ ID NO: 35267 - RNA, 20 nt, Artificial Sequence
  HTT spacer sequence TTCN PAM
guugcccagcuuggagugca

SEQ ID NO: 35268 - RNA, 20 nt, Artificial Sequence
  HTT spacer sequence TTCN PAM
gccucagccuucucaguagu

SEQ ID NO: 35269 - RNA, 20 nt, Artificial Sequence
  HTT spacer sequence TTCN PAM
caguaguugggacuacaggc

SEQ ID NO: 35270 - RNA, 20 nt, Artificial Sequence
  HTT spacer sequence TTCN PAM
gccucccagguucaagugau

SEQ ID NO: 35271 - RNA, 20 nt, Artificial Sequence
  HTT spacer sequence TTCN PAM
agugauucuccugccucagc

SEQ ID NO: 35272 - RNA, 20 nt, Artificial Sequence
  HTT spacer sequence TTCN PAM
ccugccucagccucccgagu

SEQ ID NO: 35273 - RNA, 20 nt, Artificial Sequence
  HTT spacer sequence TTCN PAM
ccauguuggccaggcugguc

SEQ ID NO: 35274 - RNA, 20 nt, Artificial Sequence
  HTT spacer sequence TTCN PAM
agaccagccuggccaacaug

SEQ ID NO: 35275 - RNA, 20 nt, Artificial Sequence
  HTT spacer sequence TTCN PAM
uggcugggagcgguagcuca

SEQ ID NO: 35276 - RNA, 20 nt, Artificial Sequence
  HTT spacer sequence TTCN PAM
ugagauaauucauauaauuc

SEQ ID NO: 35277 - RNA, 20 nt, Artificial Sequence
  HTT spacer sequence TTCN PAM
uauaauucacccauuuaaag

SEQ ID NO: 35278 - RNA, 20 nt, Artificial Sequence
  HTT spacer sequence TTCN PAM
cccauuuaaaguauauaauu

SEQ ID NO: 35279 - RNA, 20 nt, Artificial Sequence
  HTT spacer sequence TTCN PAM
uucucuuuaguaugcccaca

SEQ ID NO: 35280 - RNA, 20 nt, Artificial Sequence
  HTT spacer sequence TTCN PAM
cuuuaguaugcccacagagu

SEQ ID NO: 35281 - RNA, 20 nt, Artificial Sequence
  HTT spacer sequence TTCN PAM
ggugauggcuguacaacucu

SEQ ID NO: 35282 - RNA, 20 nt, Artificial Sequence
  HTT spacer sequence TTCN PAM
aaaacugauucuggugaugg

SEQ ID NO: 35283 - RNA, 20 nt, Artificial Sequence
  HTT spacer sequence TTCN PAM
uuuauggguucuaaaacuga

SEQ ID NO: 35284 - RNA, 20 nt, Artificial Sequence
  HTT spacer sequence TTCN PAM
gucucugugacucuacgucu

SEQ ID NO: 35285 - RNA, 20 nt, Artificial Sequence
  HTT spacer sequence TTCN PAM
ggacauuacuguggaugggc

SEQ ID NO: 35286 - RNA, 20 nt, Artificial Sequence
  HTT spacer sequence TTCN PAM
accaagcaggguuuucagug

SEQ ID NO: 35287 - RNA, 20 nt, Artificial Sequence
  HTT spacer sequence TTCN PAM
guguagcagccucucuguuu

SEQ ID NO: 35288 - RNA, 20 nt, Artificial Sequence
  HTT spacer sequence TTCN PAM
uuuuuuuuuaaauugugacg

SEQ ID NO: 35289 - RNA, 20 nt, Artificial Sequence
  HTT spacer sequence TTCN PAM
gucacaauuuaaaaaaaaaa

SEQ ID NO: 35290 - RNA, 20 nt, Artificial Sequence
  HTT spacer sequence TTCN PAM
gccucccggguucaagcgau

SEQ ID NO: 35291 - RNA, 20 nt, Artificial Sequence
  HTT spacer sequence TTCN PAM
agcgauucuccugccucagc

SEQ ID NO: 35292 - RNA, 20 nt, Artificial Sequence
  HTT spacer sequence TTCN PAM
ccugccucagccucccgagu

SEQ ID NO: 35293 - RNA, 20 nt, Artificial Sequence
  HTT spacer sequence TTCN PAM
acauguuagccagggugguc

SEQ ID NO: 35294 - RNA, 20 nt, Artificial Sequence
  HTT spacer sequence TTCN PAM
ugauccgccugccucggccu

SEQ ID NO: 35295 - RNA, 20 nt, Artificial Sequence
  HTT spacer sequence TTCN PAM
uuuacugucugcauuucuuc

SEQ ID NO: 35296 - RNA, 20 nt, Artificial Sequence
  HTT spacer sequence TTCN PAM
ucccugaugccuuccagucc

SEQ ID NO: 35297 - RNA, 20 nt, Artificial Sequence
  HTT spacer sequence TTCN PAM
cugaugccuuccaguccaug

SEQ ID NO: 35298 - RNA, 20 nt, Artificial Sequence
  HTT spacer sequence TTCN PAM
aguccaugcacccgauugua

SEQ ID NO: 35299 - RNA, 20 nt, Artificial Sequence
  HTT spacer sequence TTCN PAM
uccuauuaugguuuaaggug

SEQ ID NO: 35300 - RNA, 20 nt, Artificial Sequence
  HTT spacer sequence TTCN PAM
acaacagaauuuacuucuca

SEQ ID NO: 35301 - RNA, 20 nt, Artificial Sequence
  HTT spacer sequence TTCN PAM
guuguugaagccacccaggc

SEQ ID NO: 35302 - RNA, 20 nt, Artificial Sequence
  HTT spacer sequence TTCN PAM
cacacuucuggagguuggga

SEQ ID NO: 35303 - RNA, 20 nt, Artificial Sequence
  HTT spacer sequence TTCN PAM
ggagguugggaaguccaaga

SEQ ID NO: 35304 - RNA, 20 nt, Artificial Sequence
  HTT spacer sequence TTCN PAM
caaccuccagaagugugaga

SEQ ID NO: 35305 - RNA, 20 nt, Artificial Sequence
  HTT spacer sequence TTCN PAM
ccuugcccucauguggugag

SEQ ID NO: 35306 - RNA, 20 nt, Artificial Sequence
  HTT spacer sequence TTCN PAM
ucacccccucaccacaugag

SEQ ID NO: 35307 - RNA, 20 nt, Artificial Sequence
  HTT spacer sequence TTCN PAM
ugaggggucugcccucauga

SEQ ID NO: 35308 - RNA, 20 nt, Artificial Sequence
  HTT spacer sequence TTCN PAM
guguauaaauuugggggacu

SEQ ID NO: 35309 - RNA, 20 nt, Artificial Sequence
  HTT spacer sequence TTCN PAM
augucuauagucccccaaau

SEQ ID NO: 35310 - RNA, 20 nt, Artificial Sequence
  HTT spacer sequence TTCN PAM
aagaucagggagugaguaag

SEQ ID NO: 35311 - RNA, 20 nt, Artificial Sequence
  HTT spacer sequence TTCN PAM
acaugucagucaucuugccu

SEQ ID NO: 35312 - RNA, 20 nt, Artificial Sequence
  HTT spacer sequence TTCN PAM
cucugcuccaugauggcugc

SEQ ID NO: 35313 - RNA, 20 nt, Artificial Sequence
  HTT spacer sequence TTCN PAM
auaugcucucauguguugug

SEQ ID NO: 35314 - RNA, 20 nt, Artificial Sequence
  HTT spacer sequence TTCN PAM
uaaagccucaacuaucucca

SEQ ID NO: 35315 - RNA, 20 nt, Artificial Sequence
  HTT spacer sequence TTCN PAM
agcuuugcugguaaccagcu

SEQ ID NO: 35316 - RNA, 20 nt, Artificial Sequence
  HTT spacer sequence TTCN PAM
aggucacagcugguuaccag

SEQ ID NO: 35317 - RNA, 20 nt, Artificial Sequence
  HTT spacer sequence TTCN PAM
ucucugagccuguuuccucu

SEQ ID NO: 35318 - RNA, 20 nt, Artificial Sequence
  HTT spacer sequence TTCN PAM
ucuuuuagaaacaggaguuu

SEQ ID NO: 35319 - RNA, 20 nt, Artificial Sequence
  HTT spacer sequence TTCN PAM
aaaagaggaaacaggcucag

SEQ ID NO: 35320 - RNA, 20 nt, Artificial Sequence
  HTT spacer sequence TTCN PAM
agcacuuugggaggcugaga

SEQ ID NO: 35321 - RNA, 20 nt, Artificial Sequence
  HTT spacer sequence TTCN PAM
agaccagccugggcaucaua

SEQ ID NO: 35322 - RNA, 20 nt, Artificial Sequence
  HTT spacer sequence TTCN PAM
ugaggagacaggaucucaca

SEQ ID NO: 35323 - RNA, 20 nt, Artificial Sequence
  HTT spacer sequence TTCN PAM
uuguagccucaaccuccugg

SEQ ID NO: 35324 - RNA, 20 nt, Artificial Sequence
  HTT spacer sequence TTCN PAM
uuuuugagacagggucucac

SEQ ID NO: 35325 - RNA, 20 nt, Artificial Sequence
  HTT spacer sequence TTCN PAM
ugucauggcgucauggccaa

SEQ ID NO: 35326 - RNA, 20 nt, Artificial Sequence
  HTT spacer sequence TTCN PAM
auguuggccaugacgccaug

SEQ ID NO: 35327 - RNA, 20 nt, Artificial Sequence
  HTT spacer sequence TTCN PAM
aucuucaacucauucucugu

SEQ ID NO: 35328 - RNA, 20 nt, Artificial Sequence
  HTT spacer sequence TTCN PAM
acucauucucugugcaccug

SEQ ID NO: 35329 - RNA, 20 nt, Artificial Sequence
  HTT spacer sequence TTCN PAM
cugugcaccuguuaggaagu

SEQ ID NO: 35330 - RNA, 20 nt, Artificial Sequence
  HTT spacer sequence TTCN PAM
uaacaggugcacagagaaug

SEQ ID NO: 35331 - RNA, 20 nt, Artificial Sequence
  HTT spacer sequence TTCN PAM
gacacuguacacauuuuauu

SEQ ID NO: 35332 - RNA, 20 nt, Artificial Sequence
  HTT spacer sequence TTCN PAM
uggacccugauauguacagu

SEQ ID NO: 35333 - RNA, 20 nt, Artificial Sequence
  HTT spacer sequence TTCN PAM
aauuuucaguuuuguuauac

SEQ ID NO: 35334 - RNA, 20 nt, Artificial Sequence
  HTT spacer sequence TTCN PAM
guuuuguuauacuuccauca

SEQ ID NO: 35335 - RNA, 20 nt, Artificial Sequence
  HTT spacer sequence TTCN PAM
aucacauguuuuuguuuuuu

SEQ ID NO: 35336 - RNA, 20 nt, Artificial Sequence
  HTT spacer sequence TTCN PAM
auuuuaggcagccuugccuu

SEQ ID NO: 35337 - RNA, 20 nt, Artificial Sequence
  HTT spacer sequence TTCN PAM
cuaacaaaccccccuucucu

SEQ ID NO: 35338 - RNA, 20 nt, Artificial Sequence
  HTT spacer sequence TTCN PAM
cuaagucccauccgacgaaa

SEQ ID NO: 35339 - RNA, 20 nt, Artificial Sequence
  HTT spacer sequence TTCN PAM
ucggaugggacuuagagaag

SEQ ID NO: 35340 - RNA, 20 nt, Artificial Sequence
  HTT spacer sequence TTCN PAM
ccuuucgucggaugggacuu

SEQ ID NO: 35341 - RNA, 20 nt, Artificial Sequence
  HTT spacer sequence TTCN PAM
ccuuccccuuucgucggaug

SEQ ID NO: 35342 - RNA, 20 nt, Artificial Sequence
  HTT spacer sequence TTCN PAM
uucuccuuccccuuucgucg

SEQ ID NO: 35343 - RNA, 20 nt, Artificial Sequence
  HTT spacer sequence TTCN PAM
ccugguucuuucuccuuccc

SEQ ID NO: 35344 - RNA, 20 nt, Artificial Sequence
  HTT spacer sequence TTCN PAM
ugggacucaacgguacagau

SEQ ID NO: 35345 - RNA, 20 nt, Artificial Sequence
  HTT spacer sequence TTCN PAM
uaccugcacuggccucacug

SEQ ID NO: 35346 - RNA, 20 nt, Artificial Sequence
  HTT spacer sequence TTCN PAM
ccacgcuguuuccuaccugc

SEQ ID NO: 35347 - RNA, 20 nt, Artificial Sequence
  HTT spacer sequence TTCN PAM
acaugacagaugcugcacuc

SEQ ID NO: 35348 - RNA, 20 nt, Artificial Sequence
  HTT spacer sequence TTCN PAM
cuaaaacaccaaguuacuua

SEQ ID NO: 35349 - RNA, 20 nt, Artificial Sequence
  HTT spacer sequence TTCN PAM
cucacuuuacugauguguau

SEQ ID NO: 35350 - RNA, 20 nt, Artificial Sequence
  HTT spacer sequence TTCN PAM
ccaggugcgguucaagauau

SEQ ID NO: 35351 - RNA, 20 nt, Artificial Sequence
  HTT spacer sequence TTCN PAM
agauauuagaaacuaaugac

SEQ ID NO: 35352 - RNA, 20 nt, Artificial Sequence
  HTT spacer sequence TTCN PAM
aauaucuugaaccgcaccug

SEQ ID NO: 35353 - RNA, 20 nt, Artificial Sequence
  HTT spacer sequence TTCN PAM
gaccaaaagguggucugugu

SEQ ID NO: 35354 - RNA, 20 nt, Artificial Sequence
  HTT spacer sequence TTCN PAM
aagugccacuggcugacaug

SEQ ID NO: 35355 - RNA, 20 nt, Artificial Sequence
  HTT spacer sequence TTCN PAM
agcccuagcauggagcauca

SEQ ID NO: 35356 - RNA, 20 nt, Artificial Sequence
  HTT spacer sequence TTCN PAM
cugguugcaggugauggcug

SEQ ID NO: 35357 - RNA, 20 nt, Artificial Sequence
  HTT spacer sequence TTCN PAM
guaagggaagugguguagau

SEQ ID NO: 35358 - RNA, 20 nt, Artificial Sequence
  HTT spacer sequence TTCN PAM
cuuacugaaaaucaggaggc

SEQ ID NO: 35359 - RNA, 20 nt, Artificial Sequence
  HTT spacer sequence TTCN PAM
uaagcaucuacaccacuucc

SEQ ID NO: 35360 - RNA, 20 nt, Artificial Sequence
  HTT spacer sequence TTCN PAM
cucacuacaucuauuccuaa

SEQ ID NO: 35361 - RNA, 20 nt, Artificial Sequence
  HTT spacer sequence TTCN PAM
gauaugucaaaaauucugau

SEQ ID NO: 35362 - RNA, 20 nt, Artificial Sequence
  HTT spacer sequence TTCN PAM
gauuggaaauggaauauuua

SEQ ID NO: 35363 - RNA, 20 nt, Artificial Sequence
  HTT spacer sequence TTCN PAM
aaucagaauuuuugacauau

SEQ ID NO: 35364 - RNA, 20 nt, Artificial Sequence
  HTT spacer sequence TTCN PAM
auuuccaaucagaauuuuug

SEQ ID NO: 35365 - RNA, 20 nt, Artificial Sequence
  HTT spacer sequence TTCN PAM
aaauguaaauauuccauuuc

SEQ ID NO: 35366 - RNA, 20 nt, Artificial Sequence
  HTT spacer sequence TTCN PAM
cucgccuuuagcucuuccaa

SEQ ID NO: 35367 - RNA, 20 nt, Artificial Sequence
  HTT spacer sequence TTCN PAM
caaguuuggaggaccuuuuu

SEQ ID NO: 35368 - RNA, 20 nt, Artificial Sequence
  HTT spacer sequence TTCN PAM
uggguaaaaaaagguccucc

SEQ ID NO: 35369 - RNA, 20 nt, Artificial Sequence
  HTT spacer sequence TTCN PAM
gaccuuuucauggguaaaaa

SEQ ID NO: 35370 - RNA, 20 nt, Artificial Sequence
  HTT spacer sequence TTCN PAM
guucugaccuuuucaugggu

SEQ ID NO: 35371 - RNA, 20 nt, Artificial Sequence
  HTT spacer sequence TTCN PAM
auaaacugcagucacaccua

SEQ ID NO: 35372 - RNA, 20 nt, Artificial Sequence
  HTT spacer sequence TTCN PAM
cauccauacugcucucggug

SEQ ID NO: 35373 - RNA, 20 nt, Artificial Sequence
  HTT spacer sequence TTCN PAM
ugcuuugccaggcuccucuc

SEQ ID NO: 35374 - RNA, 20 nt, Artificial Sequence
  HTT spacer sequence TTCN PAM
cacgcugucucuuggcaccc

SEQ ID NO: 35375 - RNA, 20 nt, Artificial Sequence
  HTT spacer sequence TTCN PAM
cccauuuguuuuguguauau

SEQ ID NO: 35376 - RNA, 20 nt, Artificial Sequence
  HTT spacer sequence TTCN PAM
agcaauucuccugccucagc

SEQ ID NO: 35377 - RNA, 20 nt, Artificial Sequence
  HTT spacer sequence TTCN PAM
ccugccucagccuccugagu

SEQ ID NO: 35378 - RNA, 20 nt, Artificial Sequence
  HTT spacer sequence TTCN PAM
ccuuguuggccaggaugguc

SEQ ID NO: 35379 - RNA, 20 nt, Artificial Sequence
  HTT spacer sequence TTCN PAM
aacaucauguuguauauuac

SEQ ID NO: 35380 - RNA, 20 nt, Artificial Sequence
  HTT spacer sequence TTCN PAM
agaccaaacuggccagcaug

SEQ ID NO: 35381 - RNA, 20 nt, Artificial Sequence
  HTT spacer sequence TTCN PAM
ccaugcuggccaguuugguc

SEQ ID NO: 35382 - RNA, 20 nt, Artificial Sequence
  HTT spacer sequence TTCN PAM
ccugccucagccucccaagu

SEQ ID NO: 35383 - RNA, 20 nt, Artificial Sequence
  HTT spacer sequence TTCN PAM
agcaauucuccugccucagc

SEQ ID NO: 35384 - RNA, 20 nt, Artificial Sequence
  HTT spacer sequence TTCN PAM
ugccacugcacucuagccug

SEQ ID NO: 35385 - RNA, 20 nt, Artificial Sequence
  HTT spacer sequence TTCN PAM
uuuuuuuuuuuuuuugagac

SEQ ID NO: 35386 - RNA, 20 nt, Artificial Sequence
  HTT spacer sequence TTCN PAM
ucuuuuuuuuuuuuuuuuga

SEQ ID NO: 35387 - RNA, 20 nt, Artificial Sequence
  HTT spacer sequence TTCN PAM
acaaugcauauguauuucuu

SEQ ID NO: 35388 - RNA, 20 nt, Artificial Sequence
  HTT spacer sequence TTCN PAM
caccacaaaacaaugauacg

SEQ ID NO: 35389 - RNA, 20 nt, Artificial Sequence
  HTT spacer sequence TTCN PAM
gugauuuucuugcauauggu

SEQ ID NO: 35390 - RNA, 20 nt, Artificial Sequence
  HTT spacer sequence TTCN PAM
ugcauaugguacauugcuau

SEQ ID NO: 35391 - RNA, 20 nt, Artificial Sequence
  HTT spacer sequence TTCN PAM
agagaucuacuguauagcau

SEQ ID NO: 35392 - RNA, 20 nt, Artificial Sequence
  HTT spacer sequence TTCN PAM
uccugucuauaaaugaaauu

SEQ ID NO: 35393 - RNA, 20 nt, Artificial Sequence
  HTT spacer sequence TTCN PAM
uuuauagacaggaggaauga

SEQ ID NO: 35394 - RNA, 20 nt, Artificial Sequence
  HTT spacer sequence TTCN PAM
agguuuuuuuugagauggag

SEQ ID NO: 35395 - RNA, 20 nt, Artificial Sequence
  HTT spacer sequence TTCN PAM
ucacccaggcuggaguacca

SEQ ID NO: 35396 - RNA, 20 nt, Artificial Sequence
  HTT spacer sequence TTCN PAM
cccaggcuggaguaccaugg

SEQ ID NO: 35397 - RNA, 20 nt, Artificial Sequence
  HTT spacer sequence TTCN PAM
agcaauucuccugccucagc

SEQ ID NO: 35398 - RNA, 20 nt, Artificial Sequence
  HTT spacer sequence TTCN PAM
ccugccucagccuccugagu

SEQ ID NO: 35399 - RNA, 20 nt, Artificial Sequence
  HTT spacer sequence TTCN PAM
acuaaaaauacaaaaauuag

SEQ ID NO: 35400 - RNA, 20 nt, Artificial Sequence
  HTT spacer sequence TTCN PAM
ccauguuggccaggcugguc

SEQ ID NO: 35401 - RNA, 20 nt, Artificial Sequence
  HTT spacer sequence TTCN PAM
agaccagccuggccaacaug

SEQ ID NO: 35402 - RNA, 20 nt, Artificial Sequence
  HTT spacer sequence TTCN PAM
aaggauugacuguaguacag

SEQ ID NO: 35403 - RNA, 20 nt, Artificial Sequence
  HTT spacer sequence TTCN PAM
uccuguacuacagucaaucc

SEQ ID NO: 35404 - RNA, 20 nt, Artificial Sequence
  HTT spacer sequence TTCN PAM
acaggucaaucuuccuccug

SEQ ID NO: 35405 - RNA, 20 nt, Artificial Sequence
  HTT spacer sequence TTCN PAM
gaugaauuaaauaaacuaag

SEQ ID NO: 35406 - RNA, 20 nt, Artificial Sequence
  HTT spacer sequence TTCN PAM
ucagaaagaugauaguaaua

SEQ ID NO: 35407 - RNA, 20 nt, Artificial Sequence
  HTT spacer sequence TTCN PAM
aacugaaguagaauaguugu

SEQ ID NO: 35408 - RNA, 20 nt, Artificial Sequence
  HTT spacer sequence TTCN PAM
guuugaagacuuuugacuug

SEQ ID NO: 35409 - RNA, 20 nt, Artificial Sequence
  HTT spacer sequence TTCN PAM
acuucaguuugaagacuuuu

SEQ ID NO: 35410 - RNA, 20 nt, Artificial Sequence
  HTT spacer sequence TTCN PAM
ugagcacaccaaguaaucaa

SEQ ID NO: 35411 - RNA, 20 nt, Artificial Sequence
  HTT spacer sequence TTCN PAM
uuaguggccaacaacuucau

SEQ ID NO: 35412 - RNA, 20 nt, Artificial Sequence
  HTT spacer sequence TTCN PAM
ggaauuggccagugguccuu

SEQ ID NO: 35413 - RNA, 20 nt, Artificial Sequence
  HTT spacer sequence TTCN PAM
agaaccucucugagccuaag

SEQ ID NO: 35414 - RNA, 20 nt, Artificial Sequence
  HTT spacer sequence TTCN PAM
aggaccacuggccaauucca

SEQ ID NO: 35415 - RNA, 20 nt, Artificial Sequence
  HTT spacer sequence TTCN PAM
cuaacugauuucucacaaag

SEQ ID NO: 35416 - RNA, 20 nt, Artificial Sequence
  HTT spacer sequence TTCN PAM
cacaaagcaaacaagcaauc

SEQ ID NO: 35417 - RNA, 20 nt, Artificial Sequence
  HTT spacer sequence TTCN PAM
uauuuuguuauuuaaaaagu

SEQ ID NO: 35418 - RNA, 20 nt, Artificial Sequence
  HTT spacer sequence TTCN PAM
cauuacuucuaguuaaucaa

SEQ ID NO: 35419 - RNA, 20 nt, Artificial Sequence
  HTT spacer sequence TTCN PAM
aguuaaucaaaaggucagag

SEQ ID NO: 35420 - RNA, 20 nt, Artificial Sequence
  HTT spacer sequence TTCN PAM
ucugaccuuuugauuaacua

SEQ ID NO: 35421 - RNA, 20 nt, Artificial Sequence
  HTT spacer sequence TTCN PAM
aguauuuccucugaccuuuu

SEQ ID NO: 35422 - RNA, 20 nt, Artificial Sequence
  HTT spacer sequence TTCN PAM
uacuagaauacuuuaaaaaa

SEQ ID NO: 35423 - RNA, 20 nt, Artificial Sequence
  HTT spacer sequence TTCN PAM
aguaugaaaauauucaagua

SEQ ID NO: 35424 - RNA, 20 nt, Artificial Sequence
  HTT spacer sequence TTCN PAM
aguaaucucuuuaaaacuug

SEQ ID NO: 35425 - RNA, 20 nt, Artificial Sequence
  HTT spacer sequence TTCN PAM
agacaaucugauaccucagg

SEQ ID NO: 35426 - RNA, 20 nt, Artificial Sequence
  HTT spacer sequence TTCN PAM
aucaucuuccuucauaccuc

SEQ ID NO: 35427 - RNA, 20 nt, Artificial Sequence
  HTT spacer sequence TTCN PAM
uucauaccucaaacugcaug

SEQ ID NO: 35428 - RNA, 20 nt, Artificial Sequence
  HTT spacer sequence TTCN PAM
uaccucaaacugcaugaugu

SEQ ID NO: 35429 - RNA, 20 nt, Artificial Sequence
  HTT spacer sequence TTCN PAM
ggacaucaugcaguuugagg

SEQ ID NO: 35430 - RNA, 20 nt, Artificial Sequence
  HTT spacer sequence TTCN PAM
uaugauuuguaggauguaua

SEQ ID NO: 35431 - RNA, 20 nt, Artificial Sequence
  HTT spacer sequence TTCN PAM
aguuuguuugucuuucagcu

SEQ ID NO: 35432 - RNA, 20 nt, Artificial Sequence
  HTT spacer sequence TTCN PAM
gcuuuguuuaugauagcuuc

SEQ ID NO: 35433 - RNA, 20 nt, Artificial Sequence
  HTT spacer sequence TTCN PAM
aucauacagguguuuuggau

SEQ ID NO: 35434 - RNA, 20 nt, Artificial Sequence
  HTT spacer sequence TTCN PAM
uauuguuuguacucacagcu

SEQ ID NO: 35435 - RNA, 20 nt, Artificial Sequence
  HTT spacer sequence TTCN PAM
cccuauaaccuggcugcaca

SEQ ID NO: 35436 - RNA, 20 nt, Artificial Sequence
  HTT spacer sequence TTCN PAM
uucccucccgugaggcucac

SEQ ID NO: 35437 - RNA, 20 nt, Artificial Sequence
  HTT spacer sequence TTCN PAM
cucccgugaggcucacacaa

SEQ ID NO: 35438 - RNA, 20 nt, Artificial Sequence
  HTT spacer sequence TTCN PAM
agacucacagaagaaaagca

SEQ ID NO: 35439 - RNA, 20 nt, Artificial Sequence
  HTT spacer sequence TTCN PAM
gugagucuggaauuguggcu

SEQ ID NO: 35440 - RNA, 20 nt, Artificial Sequence
  HTT spacer sequence TTCN PAM
ucugugagucuggaauugug

SEQ ID NO: 35441 - RNA, 20 nt, Artificial Sequence
  HTT spacer sequence TTCN PAM
gcauaaaccauguguuucaa

SEQ ID NO: 35442 - RNA, 20 nt, Artificial Sequence
  HTT spacer sequence TTCN PAM
aauagucugggcauggugag

SEQ ID NO: 35443 - RNA, 20 nt, Artificial Sequence
  HTT spacer sequence TTCN PAM
cuagcugauaacaaguggcu

SEQ ID NO: 35444 - RNA, 20 nt, Artificial Sequence
  HTT spacer sequence TTCN PAM
uacgcugacauaaacuuucc

SEQ ID NO: 35445 - RNA, 20 nt, Artificial Sequence
  HTT spacer sequence TTCN PAM
ccagauacccccaagagcca

SEQ ID NO: 35446 - RNA, 20 nt, Artificial Sequence
  HTT spacer sequence TTCN PAM
gucuagggauguuuuaguuu

SEQ ID NO: 35447 - RNA, 20 nt, Artificial Sequence
  HTT spacer sequence TTCN PAM
uuuuuuuuuuuaacuuuaaa

SEQ ID NO: 35448 - RNA, 20 nt, Artificial Sequence
  HTT spacer sequence TTCN PAM
guucaucugcaauuuguuag

SEQ ID NO: 35449 - RNA, 20 nt, Artificial Sequence
  HTT spacer sequence TTCN PAM
ucugcaauuuguuagauaug

SEQ ID NO: 35450 - RNA, 20 nt, Artificial Sequence
  HTT spacer sequence TTCN PAM
uaucuaacaaauugcagaug

SEQ ID NO: 35451 - RNA, 20 nt, Artificial Sequence
  HTT spacer sequence TTCN PAM
guaaacauuauuggggacaa

SEQ ID NO: 35452 - RNA, 20 nt, Artificial Sequence
  HTT spacer sequence TTCN PAM
ucuguaaacauuauugggga

SEQ ID NO: 35453 - RNA, 20 nt, Artificial Sequence
  HTT spacer sequence TTCN PAM
gcacuaauuggcuugaguua

SEQ ID NO: 35454 - RNA, 20 nt, Artificial Sequence
  HTT spacer sequence TTCN PAM
cauaguucucuaguuucagu

SEQ ID NO: 35455 - RNA, 20 nt, Artificial Sequence
  HTT spacer sequence TTCN PAM
cuaguuucaguaguuucauu

SEQ ID NO: 35456 - RNA, 20 nt, Artificial Sequence
  HTT spacer sequence TTCN PAM
guaguuucauuuauuauuuu

SEQ ID NO: 35457 - RNA, 20 nt, Artificial Sequence
  HTT spacer sequence TTCN PAM
uuuauuauuuuguuauauca

SEQ ID NO: 35458 - RNA, 20 nt, Artificial Sequence
  HTT spacer sequence TTCN PAM
aauagaugagcagacagaua

SEQ ID NO: 35459 - RNA, 20 nt, Artificial Sequence
  HTT spacer sequence TTCN PAM
uuuuuagacagagucuugcu

SEQ ID NO: 35460 - RNA, 20 nt, Artificial Sequence
  HTT spacer sequence TTCN PAM
uaauuauuguagcuuaaugg

SEQ ID NO: 35461 - RNA, 20 nt, Artificial Sequence
  HTT spacer sequence TTCN PAM
ccuguuguucuuuagaauuu

SEQ ID NO: 35462 - RNA, 20 nt, Artificial Sequence
  HTT spacer sequence TTCN PAM
uuagaauuuucuggauauuc

SEQ ID NO: 35463 - RNA, 20 nt, Artificial Sequence
  HTT spacer sequence TTCN PAM
aaagaacaacaggggaacug

SEQ ID NO: 35464 - RNA, 20 nt, Artificial Sequence
  HTT spacer sequence TTCN PAM
ggauauucuucuuuauugau

SEQ ID NO: 35465 - RNA, 20 nt, Artificial Sequence
  HTT spacer sequence TTCN PAM
ucuuuauugauuuugggaug

SEQ ID NO: 35466 - RNA, 20 nt, Artificial Sequence
  HTT spacer sequence TTCN PAM
uuauugauuuugggauguga

SEQ ID NO: 35467 - RNA, 20 nt, Artificial Sequence
  HTT spacer sequence TTCN PAM
caucccaaaaucaauaaaga

SEQ ID NO: 35468 - RNA, 20 nt, Artificial Sequence
  HTT spacer sequence TTCN PAM
auuguucacaucccaaaauc

SEQ ID NO: 35469 - RNA, 20 nt, Artificial Sequence
  HTT spacer sequence TTCN PAM
acuuguagauugauuuaggg

SEQ ID NO: 35470 - RNA, 20 nt, Artificial Sequence
  HTT spacer sequence TTCN PAM
cccuaaaucaaucuacaagu

SEQ ID NO: 35471 - RNA, 20 nt, Artificial Sequence
  HTT spacer sequence TTCN PAM
ggacagggugacuuaacauc

SEQ ID NO: 35472 - RNA, 20 nt, Artificial Sequence
  HTT spacer sequence TTCN PAM
uauuuguucagaacuuuuua

SEQ ID NO: 35473 - RNA, 20 nt, Artificial Sequence
  HTT spacer sequence TTCN PAM
gaacuuuuuaaauuaccuca

SEQ ID NO: 35474 - RNA, 20 nt, Artificial Sequence
  HTT spacer sequence TTCN PAM
gaacaaauaggaaagcaucc

SEQ ID NO: 35475 - RNA, 20 nt, Artificial Sequence
  HTT spacer sequence TTCN PAM
gagguaauuuaaaaaguucu

SEQ ID NO: 35476 - RNA, 20 nt, Artificial Sequence
  HTT spacer sequence TTCN PAM
ugugcuucugagguaauuua

SEQ ID NO: 35477 - RNA, 20 nt, Artificial Sequence
  HTT spacer sequence TTCN PAM
cauagcucuugcacauuucu

SEQ ID NO: 35478 - RNA, 20 nt, Artificial Sequence
  HTT spacer sequence TTCN PAM
ugauaaaugaauccucaggu

SEQ ID NO: 35479 - RNA, 20 nt, Artificial Sequence
  HTT spacer sequence TTCN PAM
uuuaucaagaaaugugcaag

SEQ ID NO: 35480 - RNA, 20 nt, Artificial Sequence
  HTT spacer sequence TTCN PAM
ucuguuuuuguuacuaauag

SEQ ID NO: 35481 - RNA, 20 nt, Artificial Sequence
  HTT spacer sequence TTCN PAM
uauggguuuuuuuuccccug

SEQ ID NO: 35482 - RNA, 20 nt, Artificial Sequence
  HTT spacer sequence TTCN PAM
ccugaaaaucauuuaucaaa

SEQ ID NO: 35483 - RNA, 20 nt, Artificial Sequence
  HTT spacer sequence TTCN PAM
ggggaaaaaaaacccauaag

SEQ ID NO: 35484 - RNA, 20 nt, Artificial Sequence
  HTT spacer sequence TTCN PAM
gaaggauguuugauaauuuu

SEQ ID NO: 35485 - RNA, 20 nt, Artificial Sequence
  HTT spacer sequence TTCN PAM
gaaaauaagccacauacguu

SEQ ID NO: 35486 - RNA, 20 nt, Artificial Sequence
  HTT spacer sequence TTCN PAM
aaaauuaucaaacauccuuc

SEQ ID NO: 35487 - RNA, 20 nt, Artificial Sequence
  HTT spacer sequence TTCN PAM
uaucuuccaaaauuaucaaa

SEQ ID NO: 35488 - RNA, 20 nt, Artificial Sequence
  HTT spacer sequence TTCN PAM
uauuuuacaagguuugaggu

SEQ ID NO: 35489 - RNA, 20 nt, Artificial Sequence
  HTT spacer sequence TTCN PAM
caugucagcucccaaagcag

SEQ ID NO: 35490 - RNA, 20 nt, Artificial Sequence
  HTT spacer sequence TTCN PAM
gcuuugggagcugacaugag

SEQ ID NO: 35491 - RNA, 20 nt, Artificial Sequence
  HTT spacer sequence TTCN PAM
acaugccgucuucugcuuug

SEQ ID NO: 35492 - RNA, 20 nt, Artificial Sequence
  HTT spacer sequence TTCN PAM
cuacggcauuuuucaacaug

SEQ ID NO: 35493 - RNA, 20 nt, Artificial Sequence
  HTT spacer sequence TTCN PAM
uuuccaccuguuuucaacuc

SEQ ID NO: 35494 - RNA, 20 nt, Artificial Sequence
  HTT spacer sequence TTCN PAM
accuguuuucaacucauauc

SEQ ID NO: 35495 - RNA, 20 nt, Artificial Sequence
  HTT spacer sequence TTCN PAM
acucauaucaucuugaauuu

SEQ ID NO: 35496 - RNA, 20 nt, Artificial Sequence
  HTT spacer sequence TTCN PAM
agaugauaugaguugaaaac

SEQ ID NO: 35497 - RNA, 20 nt, Artificial Sequence
  HTT spacer sequence TTCN PAM
gggcaccuuuccaugcuccu

SEQ ID NO: 35498 - RNA, 20 nt, Artificial Sequence
  HTT spacer sequence TTCN PAM
augcuccuagugcuugcuau

SEQ ID NO: 35499 - RNA, 20 nt, Artificial Sequence
  HTT spacer sequence TTCN PAM
uuccugaauacccugaacuc

SEQ ID NO: 35500 - RNA, 20 nt, Artificial Sequence
  HTT spacer sequence TTCN PAM
ugaauacccugaacuccagc

SEQ ID NO: 35501 - RNA, 20 nt, Artificial Sequence
  HTT spacer sequence TTCN PAM
ggaaggaaaauaauaaacag

SEQ ID NO: 35502 - RNA, 20 nt, Artificial Sequence
  HTT spacer sequence TTCN PAM
ggguauucaggaaggaaaau

SEQ ID NO: 35503 - RNA, 20 nt, Artificial Sequence
  HTT spacer sequence TTCN PAM
gcuguaauucuggccucccu

SEQ ID NO: 35504 - RNA, 20 nt, Artificial Sequence
  HTT spacer sequence TTCN PAM
ggccucccuggcaucuugga

SEQ ID NO: 35505 - RNA, 20 nt, Artificial Sequence
  HTT spacer sequence TTCN PAM
uuugcucugucauccccgcg

SEQ ID NO: 35506 - RNA, 20 nt, Artificial Sequence
  HTT spacer sequence TTCN PAM
cagcugaagugcguuuggag

SEQ ID NO: 35507 - RNA, 20 nt, Artificial Sequence
  HTT spacer sequence TTCN PAM
gcugagaagcugcgcagcag

SEQ ID NO: 35508 - RNA, 20 nt, Artificial Sequence
  HTT spacer sequence TTCN PAM
uugguuccuucugcugaguu

SEQ ID NO: 35509 - RNA, 20 nt, Artificial Sequence
  HTT spacer sequence TTCN PAM
uucugcugaguugcucagcg

SEQ ID NO: 35510 - RNA, 20 nt, Artificial Sequence
  HTT spacer sequence TTCN PAM
gcugaguugcucagcgucuc

SEQ ID NO: 35511 - RNA, 20 nt, Artificial Sequence
  HTT spacer sequence TTCN PAM
uguguggcccuuccugcacu

SEQ ID NO: 35512 - RNA, 20 nt, Artificial Sequence
  HTT spacer sequence TTCN PAM
ugcacuccucugauuccuuu

SEQ ID NO: 35513 - RNA, 20 nt, Artificial Sequence
  HTT spacer sequence TTCN PAM
uuuugucuucccugguuucu

SEQ ID NO: 35514 - RNA, 20 nt, Artificial Sequence
  HTT spacer sequence TTCN PAM
cugguuucuugcuuugguuu

SEQ ID NO: 35515 - RNA, 20 nt, Artificial Sequence
  HTT spacer sequence TTCN PAM
ugcuuugguuucgagucucc

SEQ ID NO: 35516 - RNA, 20 nt, Artificial Sequence
  HTT spacer sequence TTCN PAM
agucuccacagaacuuuugc

SEQ ID NO: 35517 - RNA, 20 nt, Artificial Sequence
  HTT spacer sequence TTCN PAM
guggagacucgaaaccaaag

SEQ ID NO: 35518 - RNA, 20 nt, Artificial Sequence
  HTT spacer sequence TTCN PAM
gaagaccuggaagcuuuuuc

SEQ ID NO: 35519 - RNA, 20 nt, Artificial Sequence
  HTT spacer sequence TTCN PAM
gaagagcugcaaaaguucug

SEQ ID NO: 35520 - RNA, 20 nt, Artificial Sequence
  HTT spacer sequence TTCN PAM
aggucuucagaagagcugca

SEQ ID NO: 35521 - RNA, 20 nt, Artificial Sequence
  HTT spacer sequence TTCN PAM
ucuuaauucucaucucauga

SEQ ID NO: 35522 - RNA, 20 nt, Artificial Sequence
  HTT spacer sequence TTCN PAM
caucucaugaccucuuuucc

SEQ ID NO: 35523 - RNA, 20 nt, Artificial Sequence
  HTT spacer sequence TTCN PAM
cuucuuugagagcuagaacu

SEQ ID NO: 35524 - RNA, 20 nt, Artificial Sequence
  HTT spacer sequence TTCN PAM
uugagagcuagaacuuccca

SEQ ID NO: 35525 - RNA, 20 nt, Artificial Sequence
  HTT spacer sequence TTCN PAM
agcucucaaagaagggaaaa

SEQ ID NO: 35526 - RNA, 20 nt, Artificial Sequence
  HTT spacer sequence TTCN PAM
cauggugaacuucucuuucc

SEQ ID NO: 35527 - RNA, 20 nt, Artificial Sequence
  HTT spacer sequence TTCN PAM
ccaugggaaguucuagcucu

SEQ ID NO: 35528 - RNA, 20 nt, Artificial Sequence
  HTT spacer sequence TTCN PAM
cuuuccagaauuccaugccu

SEQ ID NO: 35529 - RNA, 20 nt, Artificial Sequence
  HTT spacer sequence TTCN PAM
agaauuccaugccuucuuuu

SEQ ID NO: 35530 - RNA, 20 nt, Artificial Sequence
  HTT spacer sequence TTCN PAM
ggaaagagaaguucaccaug

SEQ ID NO: 35531 - RNA, 20 nt, Artificial Sequence
  HTT spacer sequence TTCN PAM
augccuucuuuucccuccca

SEQ ID NO: 35532 - RNA, 20 nt, Artificial Sequence
  HTT spacer sequence TTCN PAM
uuucccucccacuuaccugu

SEQ ID NO: 35533 - RNA, 20 nt, Artificial Sequence
  HTT spacer sequence TTCN PAM
cucccacuuaccuguugucc

SEQ ID NO: 35534 - RNA, 20 nt, Artificial Sequence
  HTT spacer sequence TTCN PAM
ccuccaauaugcacagcaau

SEQ ID NO: 35535 - RNA, 20 nt, Artificial Sequence
  HTT spacer sequence TTCN PAM
ucccugggcucuucaucuca

SEQ ID NO: 35536 - RNA, 20 nt, Artificial Sequence
  HTT spacer sequence TTCN PAM
cugggcucuucaucucacau

SEQ ID NO: 35537 - RNA, 20 nt, Artificial Sequence
  HTT spacer sequence TTCN PAM
ucucacaugacaucaccaca

SEQ ID NO: 35538 - RNA, 20 nt, Artificial Sequence
  HTT spacer sequence TTCN PAM
uuggacccucagugguguca

SEQ ID NO: 35539 - RNA, 20 nt, Artificial Sequence
  HTT spacer sequence TTCN PAM
uuccuuuggcuggccuuagg

SEQ ID NO: 35540 - RNA, 20 nt, Artificial Sequence
  HTT spacer sequence TTCN PAM
uuuggcuggccuuagggcac

SEQ ID NO: 35541 - RNA, 20 nt, Artificial Sequence
  HTT spacer sequence TTCN PAM
guuucugugucugucucuug

SEQ ID NO: 35542 - RNA, 20 nt, Artificial Sequence
  HTT spacer sequence TTCN PAM
gugucugucucuugccugcu

SEQ ID NO: 35543 - RNA, 20 nt, Artificial Sequence
  HTT spacer sequence TTCN PAM
gacuucgcccagagaaagcu

SEQ ID NO: 35544 - RNA, 20 nt, Artificial Sequence
  HTT spacer sequence TTCN PAM
cccagagaaagcuucucuuu

SEQ ID NO: 35545 - RNA, 20 nt, Artificial Sequence
  HTT spacer sequence TTCN PAM
cugggcgaagucagaagcag

SEQ ID NO: 35546 - RNA, 20 nt, Artificial Sequence
  HTT spacer sequence TTCN PAM
cuuucacaaggguucuuaga

SEQ ID NO: 35547 - RNA, 20 nt, Artificial Sequence
  HTT spacer sequence TTCN PAM
caaggguucuuagauuuaug

SEQ ID NO: 35548 - RNA, 20 nt, Artificial Sequence
  HTT spacer sequence TTCN PAM
uagauuuauguucacugagc

SEQ ID NO: 35549 - RNA, 20 nt, Artificial Sequence
  HTT spacer sequence TTCN PAM
cugagcaccuucuuuucuga

SEQ ID NO: 35550 - RNA, 20 nt, Artificial Sequence
  HTT spacer sequence TTCN PAM
uuucugaggcaguguuuuac

SEQ ID NO: 35551 - RNA, 20 nt, Artificial Sequence
  HTT spacer sequence TTCN PAM
gaggcaguguuuuaccaaua

SEQ ID NO: 35552 - RNA, 20 nt, Artificial Sequence
  HTT spacer sequence TTCN PAM
uagucagucucgccuuaccu

SEQ ID NO: 35553 - RNA, 20 nt, Artificial Sequence
  HTT spacer sequence TTCN PAM
uguuaugcaugucuuugguc

SEQ ID NO: 35554 - RNA, 20 nt, Artificial Sequence
  HTT spacer sequence TTCN PAM
cugagucuguaaaauagaau

SEQ ID NO: 35555 - RNA, 20 nt, Artificial Sequence
  HTT spacer sequence TTCN PAM
auuuuacagacucagagaau

SEQ ID NO: 35556 - RNA, 20 nt, Artificial Sequence
  HTT spacer sequence TTCN PAM
uguaauuaaauuauacagca

SEQ ID NO: 35557 - RNA, 20 nt, Artificial Sequence
  HTT spacer sequence TTCN PAM
aaaggauuucauguaauuaa

SEQ ID NO: 35558 - RNA, 20 nt, Artificial Sequence
  HTT spacer sequence TTCN PAM
auuuggauacaauaaaauau

SEQ ID NO: 35559 - RNA, 20 nt, Artificial Sequence
  HTT spacer sequence TTCN PAM
cauaggguugguucaauuug

SEQ ID NO: 35560 - RNA, 20 nt, Artificial Sequence
  HTT spacer sequence TTCN PAM
cccagggauccuaguguaua

SEQ ID NO: 35561 - RNA, 20 nt, Artificial Sequence
  HTT spacer sequence TTCN PAM
uuauacacuaggaucccugg

SEQ ID NO: 35562 - RNA, 20 nt, Artificial Sequence
  HTT spacer sequence TTCN PAM
auuuuuugauauaccacaua

SEQ ID NO: 35563 - RNA, 20 nt, Artificial Sequence
  HTT spacer sequence TTCN PAM
cauuaugaaagaaaguuagg

SEQ ID NO: 35564 - RNA, 20 nt, Artificial Sequence
  HTT spacer sequence TTCN PAM
uaaugagaaaaaaggguuaa

SEQ ID NO: 35565 - RNA, 20 nt, Artificial Sequence
  HTT spacer sequence TTCN PAM
uucauaaugagaaaaaaggg

SEQ ID NO: 35566 - RNA, 20 nt, Artificial Sequence
  HTT spacer sequence TTCN PAM
uaacuuucuuucauaaugag

SEQ ID NO: 35567 - RNA, 20 nt, Artificial Sequence
  HTT spacer sequence TTCN PAM
uccaguagcgccaguguaac

SEQ ID NO: 35568 - RNA, 20 nt, Artificial Sequence
  HTT spacer sequence TTCN PAM
aguagcgccaguguaaccug

SEQ ID NO: 35569 - RNA, 20 nt, Artificial Sequence
  HTT spacer sequence TTCN PAM
gguuacacuggcgcuacugg

SEQ ID NO: 35570 - RNA, 20 nt, Artificial Sequence
  HTT spacer sequence TTCN PAM
aaggcuuucagguuacacug

SEQ ID NO: 35571 - RNA, 20 nt, Artificial Sequence
  HTT spacer sequence TTCN PAM
gauagcuauacaaaaacuac

SEQ ID NO: 35572 - RNA, 20 nt, Artificial Sequence
  HTT spacer sequence TTCN PAM
uuucagauagcuauacaaaa

SEQ ID NO: 35573 - RNA, 20 nt, Artificial Sequence
  HTT spacer sequence TTCN PAM
uuccaaaauauuuuuccagu

SEQ ID NO: 35574 - RNA, 20 nt, Artificial Sequence
  HTT spacer sequence TTCN PAM
aaaauauuuuuccagugcug

SEQ ID NO: 35575 - RNA, 20 nt, Artificial Sequence
  HTT spacer sequence TTCN PAM
agugcugacaacaaacacgc

SEQ ID NO: 35576 - RNA, 20 nt, Artificial Sequence
  HTT spacer sequence TTCN PAM
cuccuucaccuucccaaggu

SEQ ID NO: 35577 - RNA, 20 nt, Artificial Sequence
  HTT spacer sequence TTCN PAM
ccuucccaaggucacgcugg

SEQ ID NO: 35578 - RNA, 20 nt, Artificial Sequence
  HTT spacer sequence TTCN PAM
caaggucacgcuggaucuuc

SEQ ID NO: 35579 - RNA, 20 nt, Artificial Sequence
  HTT spacer sequence TTCN PAM
gaacagcacggaaaaguuug

SEQ ID NO: 35580 - RNA, 20 nt, Artificial Sequence
  HTT spacer sequence TTCN PAM
gaagauccagcgugaccuug

SEQ ID NO: 35581 - RNA, 20 nt, Artificial Sequence
  HTT spacer sequence TTCN PAM
gugcuguucugaagauccag

SEQ ID NO: 35582 - RNA, 20 nt, Artificial Sequence
  HTT spacer sequence TTCN PAM
ccgcucagccuuggauguuc

SEQ ID NO: 35583 - RNA, 20 nt, Artificial Sequence
  HTT spacer sequence TTCN PAM
uucucagauacuagagcugg

SEQ ID NO: 35584 - RNA, 20 nt, Artificial Sequence
  HTT spacer sequence TTCN PAM
cagauacuagagcuggccac

SEQ ID NO: 35585 - RNA, 20 nt, Artificial Sequence
  HTT spacer sequence TTCN PAM
caauguccugcaguguggcc

SEQ ID NO: 35586 - RNA, 20 nt, Artificial Sequence
  HTT spacer sequence TTCN PAM
ccuuggguuguggcuggcac

SEQ ID NO: 35587 - RNA, 20 nt, Artificial Sequence
  HTT spacer sequence TTCN PAM
gggcugaguucaucuaggau

SEQ ID NO: 35588 - RNA, 20 nt, Artificial Sequence
  HTT spacer sequence TTCN PAM
ucuaggauggagccugguuc

SEQ ID NO: 35589 - RNA, 20 nt, Artificial Sequence
  HTT spacer sequence TTCN PAM
ccagggugccuccgggagac

SEQ ID NO: 35590 - RNA, 20 nt, Artificial Sequence
  HTT spacer sequence TTCN PAM
uggcuaaggcagagucagac

SEQ ID NO: 35591 - RNA, 20 nt, Artificial Sequence
  HTT spacer sequence TTCN PAM
cccuaaacuucauggcuaag

SEQ ID NO: 35592 - RNA, 20 nt, Artificial Sequence
  HTT spacer sequence TTCN PAM
auuuguauucuauuuuuguc

SEQ ID NO: 35593 - RNA, 20 nt, Artificial Sequence
  HTT spacer sequence TTCN PAM
auuuuugucuguuaucaugu

SEQ ID NO: 35594 - RNA, 20 nt, Artificial Sequence
  HTT spacer sequence TTCN PAM
aaacuaaacugggucuaagc

SEQ ID NO: 35595 - RNA, 20 nt, Artificial Sequence
  HTT spacer sequence TTCN PAM
aaauguguuuguagaguccu

SEQ ID NO: 35596 - RNA, 20 nt, Artificial Sequence
  HTT spacer sequence TTCN PAM
uaacuugaccuuuucaagug

SEQ ID NO: 35597 - RNA, 20 nt, Artificial Sequence
  HTT spacer sequence TTCN PAM
aguggaaaggggcaaaacag

SEQ ID NO: 35598 - RNA, 20 nt, Artificial Sequence
  HTT spacer sequence TTCN PAM
acuugaaaaggucaaguuaa

SEQ ID NO: 35599 - RNA, 20 nt, Artificial Sequence
  HTT spacer sequence TTCN PAM
ucaggcacaaaagagcaagu

SEQ ID NO: 35600 - RNA, 20 nt, Artificial Sequence
  HTT spacer sequence TTCN PAM
cugacacagauagucucuga

SEQ ID NO: 35601 - RNA, 20 nt, Artificial Sequence
  HTT spacer sequence TTCN PAM
gugagauaagucagagacua

SEQ ID NO: 35602 - RNA, 20 nt, Artificial Sequence
  HTT spacer sequence TTCN PAM
uuuucuuuuuuuugguggcu

SEQ ID NO: 35603 - RNA, 20 nt, Artificial Sequence
  HTT spacer sequence TTCN PAM
uuuuuuugguggcuaauuuc

SEQ ID NO: 35604 - RNA, 20 nt, Artificial Sequence
  HTT spacer sequence TTCN PAM
guuuuauuuauauuuguuua

SEQ ID NO: 35605 - RNA, 20 nt, Artificial Sequence
  HTT spacer sequence TTCN PAM
ggguuacaugugcagaaugu

SEQ ID NO: 35606 - RNA, 20 nt, Artificial Sequence
  HTT spacer sequence TTCN PAM
gcacauguaacccagaacuu

SEQ ID NO: 35607 - RNA, 20 nt, Artificial Sequence
  HTT spacer sequence TTCN PAM
ccuaauguuaucccuccccc

SEQ ID NO: 35608 - RNA, 20 nt, Artificial Sequence
  HTT spacer sequence TTCN PAM
ccucccugugcccauguguu

SEQ ID NO: 35609 - RNA, 20 nt, Artificial Sequence
  HTT spacer sequence TTCN PAM
cauuguucaauuuccacuug

SEQ ID NO: 35610 - RNA, 20 nt, Artificial Sequence
  HTT spacer sequence TTCN PAM
auuuccacuugugagugaga

SEQ ID NO: 35611 - RNA, 20 nt, Artificial Sequence
  HTT spacer sequence TTCN PAM
acuugugagugagaacaugc

SEQ ID NO: 35612 - RNA, 20 nt, Artificial Sequence
  HTT spacer sequence TTCN PAM
cacucacaaguggaaauuga

SEQ ID NO: 35613 - RNA, 20 nt, Artificial Sequence
  HTT spacer sequence TTCN PAM
gaucuugugauaguuugcug

SEQ ID NO: 35614 - RNA, 20 nt, Artificial Sequence
  HTT spacer sequence TTCN PAM
cagcaaacuaucacaagauc

SEQ ID NO: 35615 - RNA, 20 nt, Artificial Sequence
  HTT spacer sequence TTCN PAM
agcaucauccaugugccugc

SEQ ID NO: 35616 - RNA, 20 nt, Artificial Sequence
  HTT spacer sequence TTCN PAM
uguccuuugcaggcacaugg

SEQ ID NO: 35617 - RNA, 20 nt, Artificial Sequence
  HTT spacer sequence TTCN PAM
augguguauaugugccacau

SEQ ID NO: 35618 - RNA, 20 nt, Artificial Sequence
  HTT spacer sequence TTCN PAM
uaauccagucuaucauugau

SEQ ID NO: 35619 - RNA, 20 nt, Artificial Sequence
  HTT spacer sequence TTCN PAM
gguugguuccaagucuuugc

SEQ ID NO: 35620 - RNA, 20 nt, Artificial Sequence
  HTT spacer sequence TTCN PAM
aagucuuugcuauugugacu

SEQ ID NO: 35621 - RNA, 20 nt, Artificial Sequence
  HTT spacer sequence TTCN PAM
acgauaaagacacaugcaca

SEQ ID NO: 35622 - RNA, 20 nt, Artificial Sequence
  HTT spacer sequence TTCN PAM
aguucuagaccuuugaggaa

SEQ ID NO: 35623 - RNA, 20 nt, Artificial Sequence
  HTT spacer sequence TTCN PAM
agaccuuugaggaaucgcca

SEQ ID NO: 35624 - RNA, 20 nt, Artificial Sequence
  HTT spacer sequence TTCN PAM
ucaaaggucuagaacuagaa

SEQ ID NO: 35625 - RNA, 20 nt, Artificial Sequence
  HTT spacer sequence TTCN PAM
acaauaguugaacuaauuua

SEQ ID NO: 35626 - RNA, 20 nt, Artificial Sequence
  HTT spacer sequence TTCN PAM
acuauuguggaagacagucu

SEQ ID NO: 35627 - RNA, 20 nt, Artificial Sequence
  HTT spacer sequence TTCN PAM
uauuuuuccacaaccucucc

SEQ ID NO: 35628 - RNA, 20 nt, Artificial Sequence
  HTT spacer sequence TTCN PAM
acaaccucuccagcaucugu

SEQ ID NO: 35629 - RNA, 20 nt, Artificial Sequence
  HTT spacer sequence TTCN PAM
ugacuuuuuaacgaucgcca

SEQ ID NO: 35630 - RNA, 20 nt, Artificial Sequence
  HTT spacer sequence TTCN PAM
cuaaugaccaguggugauga

SEQ ID NO: 35631 - RNA, 20 nt, Artificial Sequence
  HTT spacer sequence TTCN PAM
uaugucuguuggcugcauaa

SEQ ID NO: 35632 - RNA, 20 nt, Artificial Sequence
  HTT spacer sequence TTCN PAM
uuugcgaagugucuguucau

SEQ ID NO: 35633 - RNA, 20 nt, Artificial Sequence
  HTT spacer sequence TTCN PAM
caaaagaagacauuuaugca

SEQ ID NO: 35634 - RNA, 20 nt, Artificial Sequence
  HTT spacer sequence TTCN PAM
uauccuuuguccauuuuuug

SEQ ID NO: 35635 - RNA, 20 nt, Artificial Sequence
  HTT spacer sequence TTCN PAM
uaaauuuguuuaaguucuuu

SEQ ID NO: 35636 - RNA, 20 nt, Artificial Sequence
  HTT spacer sequence TTCN PAM
uuguagauucuggauguuaa

SEQ ID NO: 35637 - RNA, 20 nt, Artificial Sequence
  HTT spacer sequence TTCN PAM
ggauguuaaucuuuugucag

SEQ ID NO: 35638 - RNA, 20 nt, Artificial Sequence
  HTT spacer sequence TTCN PAM
guagguugccuguucacucu

SEQ ID NO: 35639 - RNA, 20 nt, Artificial Sequence
  HTT spacer sequence TTCN PAM
cucugaugauaguuucuuuu

SEQ ID NO: 35640 - RNA, 20 nt, Artificial Sequence
  HTT spacer sequence TTCN PAM
uuugcuaugcagaagcucuu

SEQ ID NO: 35641 - RNA, 20 nt, Artificial Sequence
  HTT spacer sequence TTCN PAM
gcauagcaaaagaaacuauc

SEQ ID NO: 35642 - RNA, 20 nt, Artificial Sequence
  HTT spacer sequence TTCN PAM
ugucuaaaacaccaaaagca

SEQ ID NO: 35643 - RNA, 20 nt, Artificial Sequence
  HTT spacer sequence TTCN PAM
ggacauaggcauaggcaaag

SEQ ID NO: 35644 - RNA, 20 nt, Artificial Sequence
  HTT spacer sequence TTCN PAM
ucuaggauuuuuaugguccu

SEQ ID NO: 35645 - RNA, 20 nt, Artificial Sequence
  HTT spacer sequence TTCN PAM
aggauuuuuaugguccuagg

SEQ ID NO: 35646 - RNA, 20 nt, Artificial Sequence
  HTT spacer sequence TTCN PAM
uuauaccuuacacaaaaauc

SEQ ID NO: 35647 - RNA, 20 nt, Artificial Sequence
  HTT spacer sequence TTCN PAM
guuuucugcauguggcuagc

SEQ ID NO: 35648 - RNA, 20 nt, Artificial Sequence
  HTT spacer sequence TTCN PAM
gcauguggcuagccaguuuu

SEQ ID NO: 35649 - RNA, 20 nt, Artificial Sequence
  HTT spacer sequence TTCN PAM
caacaccauuuauuaaauag

SEQ ID NO: 35650 - RNA, 20 nt, Artificial Sequence
  HTT spacer sequence TTCN PAM
cuauuuaauaaaugguguug

SEQ ID NO: 35651 - RNA, 20 nt, Artificial Sequence
  HTT spacer sequence TTCN PAM
ccauugcuuaugugugucag

SEQ ID NO: 35652 - RNA, 20 nt, Artificial Sequence
  HTT spacer sequence TTCN PAM
gaggccucuguucuguucca

SEQ ID NO: 35653 - RNA, 20 nt, Artificial Sequence
  HTT spacer sequence TTCN PAM
guuccauuggucuauauauc

SEQ ID NO: 35654 - RNA, 20 nt, Artificial Sequence
  HTT spacer sequence TTCN PAM
auuggucuauauaucuguuu

SEQ ID NO: 35655 - RNA, 20 nt, Artificial Sequence
  HTT spacer sequence TTCN PAM
aacuauacuacaacacuaca

SEQ ID NO: 35656 - RNA, 20 nt, Artificial Sequence
  HTT spacer sequence TTCN PAM
ucuagcccaggauugucuug

SEQ ID NO: 35657 - RNA, 20 nt, Artificial Sequence
  HTT spacer sequence TTCN PAM
agcccaggauugucuuggcu

SEQ ID NO: 35658 - RNA, 20 nt, Artificial Sequence
  HTT spacer sequence TTCN PAM
auaugaaguuuaaaauaguu

SEQ ID NO: 35659 - RNA, 20 nt, Artificial Sequence
  HTT spacer sequence TTCN PAM
uauggaaccaaaaaagagcc

SEQ ID NO: 35660 - RNA, 20 nt, Artificial Sequence
  HTT spacer sequence TTCN PAM
aauucugugaagaaagucag

SEQ ID NO: 35661 - RNA, 20 nt, Artificial Sequence
  HTT spacer sequence TTCN PAM
gugaagaaagucagugauag

SEQ ID NO: 35662 - RNA, 20 nt, Artificial Sequence
  HTT spacer sequence TTCN PAM
cagaauuggaaaaaacuauu

SEQ ID NO: 35663 - RNA, 20 nt, Artificial Sequence
  HTT spacer sequence TTCN PAM
ucacagaauuggaaaaaacu

SEQ ID NO: 35664 - RNA, 20 nt, Artificial Sequence
  HTT spacer sequence TTCN PAM
augcuauccccccaucaagc

SEQ ID NO: 35665 - RNA, 20 nt, Artificial Sequence
  HTT spacer sequence TTCN PAM
cgauauugauucguccuauc

SEQ ID NO: 35666 - RNA, 20 nt, Artificial Sequence
  HTT spacer sequence TTCN PAM
uccuauccaugaacauggaa

SEQ ID NO: 35667 - RNA, 20 nt, Artificial Sequence
  HTT spacer sequence TTCN PAM
uggauaggacgaaucaauau

SEQ ID NO: 35668 - RNA, 20 nt, Artificial Sequence
  HTT spacer sequence TTCN PAM
auguucauggauaggacgaa

SEQ ID NO: 35669 - RNA, 20 nt, Artificial Sequence
  HTT spacer sequence TTCN PAM
auuuguuuguguccucucuu

SEQ ID NO: 35670 - RNA, 20 nt, Artificial Sequence
  HTT spacer sequence TTCN PAM
uugagcagugguuuguaguu

SEQ ID NO: 35671 - RNA, 20 nt, Artificial Sequence
  HTT spacer sequence TTCN PAM
ccuugaagagguccuucaca

SEQ ID NO: 35672 - RNA, 20 nt, Artificial Sequence
  HTT spacer sequence TTCN PAM
aggagaacuacaaaccacug

SEQ ID NO: 35673 - RNA, 20 nt, Artificial Sequence
  HTT spacer sequence TTCN PAM
caucccuuguaaguugucuu

SEQ ID NO: 35674 - RNA, 20 nt, Artificial Sequence
  HTT spacer sequence TTCN PAM
uagguguuucauucccuuag

SEQ ID NO: 35675 - RNA, 20 nt, Artificial Sequence
  HTT spacer sequence TTCN PAM
uucccuuaguagcauuugug

SEQ ID NO: 35676 - RNA, 20 nt, Artificial Sequence
  HTT spacer sequence TTCN PAM
cuuaguagcauuugugaaug

SEQ ID NO: 35677 - RNA, 20 nt, Artificial Sequence
  HTT spacer sequence TTCN PAM
caaaugcuacuaagggaaug

SEQ ID NO: 35678 - RNA, 20 nt, Artificial Sequence
  HTT spacer sequence TTCN PAM
cucaugauuuggcucucugu

SEQ ID NO: 35679 - RNA, 20 nt, Artificial Sequence
  HTT spacer sequence TTCN PAM
uauacaccaauaacagacaa

SEQ ID NO: 35680 - RNA, 20 nt, Artificial Sequence
  HTT spacer sequence TTCN PAM
gcaaagucucaggauacaaa

SEQ ID NO: 35681 - RNA, 20 nt, Artificial Sequence
  HTT spacer sequence TTCN PAM
gcucaaaaucuccuuaagcu

SEQ ID NO: 35682 - RNA, 20 nt, Artificial Sequence
  HTT spacer sequence TTCN PAM
aaauauacaaucaugucauc

SEQ ID NO: 35683 - RNA, 20 nt, Artificial Sequence
  HTT spacer sequence TTCN PAM
ucucuuccuauuugaauacc

SEQ ID NO: 35684 - RNA, 20 nt, Artificial Sequence
  HTT spacer sequence TTCN PAM
uauuugaauacccuuuauug

SEQ ID NO: 35685 - RNA, 20 nt, Artificial Sequence
  HTT spacer sequence TTCN PAM
aauaggaagagaggaaguaa

SEQ ID NO: 35686 - RNA, 20 nt, Artificial Sequence
  HTT spacer sequence TTCN PAM
cuugccugauugcgcuggcc

SEQ ID NO: 35687 - RNA, 20 nt, Artificial Sequence
  HTT spacer sequence TTCN PAM
ggccagcgcaaucaggcaag

SEQ ID NO: 35688 - RNA, 20 nt, Artificial Sequence
  HTT spacer sequence TTCN PAM
aauacuauguugaauaggag

SEQ ID NO: 35689 - RNA, 20 nt, Artificial Sequence
  HTT spacer sequence TTCN PAM
acauaguauuggaaguucug

SEQ ID NO: 35690 - RNA, 20 nt, Artificial Sequence
  HTT spacer sequence TTCN PAM
aagggaaugcuuccaguuuu

SEQ ID NO: 35691 - RNA, 20 nt, Artificial Sequence
  HTT spacer sequence TTCN PAM
aaaaccggcacaagacaagg

SEQ ID NO: 35692 - RNA, 20 nt, Artificial Sequence
  HTT spacer sequence TTCN PAM
cuucgaaaaccggcacaaga

SEQ ID NO: 35693 - RNA, 20 nt, Artificial Sequence
  HTT spacer sequence TTCN PAM
aguuuuugcccauucaguau

SEQ ID NO: 35694 - RNA, 20 nt, Artificial Sequence
  HTT spacer sequence TTCN PAM
guaugauauuagcugugggu

SEQ ID NO: 35695 - RNA, 20 nt, Artificial Sequence
  HTT spacer sequence TTCN PAM
aucgauaccuaguuuauuga

SEQ ID NO: 35696 - RNA, 20 nt, Artificial Sequence
  HTT spacer sequence TTCN PAM
ugcuaaaaacucucaauaaa

SEQ ID NO: 35697 - RNA, 20 nt, Artificial Sequence
  HTT spacer sequence TTCN PAM
acagccuuucaugcuaaaaa

SEQ ID NO: 35698 - RNA, 20 nt, Artificial Sequence
  HTT spacer sequence TTCN PAM
gcaucuguugagauaaucau

SEQ ID NO: 35699 - RNA, 20 nt, Artificial Sequence
  HTT spacer sequence TTCN PAM
guuuaugugauggauuacgu

SEQ ID NO: 35700 - RNA, 20 nt, Artificial Sequence
  HTT spacer sequence TTCN PAM
acauacgcaaaucaauaaac

SEQ ID NO: 35701 - RNA, 20 nt, Artificial Sequence
  HTT spacer sequence TTCN PAM
agggaugaagcugacuugau

SEQ ID NO: 35702 - RNA, 20 nt, Artificial Sequence
  HTT spacer sequence TTCN PAM
ucccuggaaugcaaggcugg

SEQ ID NO: 35703 - RNA, 20 nt, Artificial Sequence
  HTT spacer sequence TTCN PAM
guuugccaguauuuuauuga

SEQ ID NO: 35704 - RNA, 20 nt, Artificial Sequence
  HTT spacer sequence TTCN PAM
caucgauguucaucagggau

SEQ ID NO: 35705 - RNA, 20 nt, Artificial Sequence
  HTT spacer sequence TTCN PAM
ucagggauauuggccuaaaa

SEQ ID NO: 35706 - RNA, 20 nt, Artificial Sequence
  HTT spacer sequence TTCN PAM
cuuuuuuuguugugucucug

SEQ ID NO: 35707 - RNA, 20 nt, Artificial Sequence
  HTT spacer sequence TTCN PAM
cucuuuuucuauugauugga

SEQ ID NO: 35708 - RNA, 20 nt, Artificial Sequence
  HTT spacer sequence TTCN PAM
auugauuggaauaguuucag

SEQ ID NO: 35709 - RNA, 20 nt, Artificial Sequence
  HTT spacer sequence TTCN PAM
aaucaauagaaaaagagaga

SEQ ID NO: 35710 - RNA, 20 nt, Artificial Sequence
  HTT spacer sequence TTCN PAM
gaaggaaugguaccaucucc

SEQ ID NO: 35711 - RNA, 20 nt, Artificial Sequence
  HTT spacer sequence TTCN PAM
gaaacuauuccaaucaauag

SEQ ID NO: 35712 - RNA, 20 nt, Artificial Sequence
  HTT spacer sequence TTCN PAM
uucugaaacuauuccaauca

SEQ ID NO: 35713 - RNA, 20 nt, Artificial Sequence
  HTT spacer sequence TTCN PAM
accagagguacaaagaggag

SEQ ID NO: 35714 - RNA, 20 nt, Artificial Sequence
  HTT spacer sequence TTCN PAM
gcugugaauccauccuggac

SEQ ID NO: 35715 - RNA, 20 nt, Artificial Sequence
  HTT spacer sequence TTCN PAM
cagccgaauucuaccagagg

SEQ ID NO: 35716 - RNA, 20 nt, Artificial Sequence
  HTT spacer sequence TTCN PAM
aaacuugaggcaauaguuaa

SEQ ID NO: 35717 - RNA, 20 nt, Artificial Sequence
  HTT spacer sequence TTCN PAM
gagauucagcuuuuuucugg

SEQ ID NO: 35718 - RNA, 20 nt, Artificial Sequence
  HTT spacer sequence TTCN PAM
gcuuuuuucugguuuagucu

SEQ ID NO: 35719 - RNA, 20 nt, Artificial Sequence
  HTT spacer sequence TTCN PAM
gguuuagucuugggagggug

SEQ ID NO: 35720 - RNA, 20 nt, Artificial Sequence
  HTT spacer sequence TTCN PAM
uggacacauacacccuccca

SEQ ID NO: 35721 - RNA, 20 nt, Artificial Sequence
  HTT spacer sequence TTCN PAM
ucuagauuuucuaguuuauu

SEQ ID NO: 35722 - RNA, 20 nt, Artificial Sequence
  HTT spacer sequence TTCN PAM
agauuuucuaguuuauuugg

SEQ ID NO: 35723 - RNA, 20 nt, Artificial Sequence
  HTT spacer sequence TTCN PAM
aguuuauuuggguagagaug

SEQ ID NO: 35724 - RNA, 20 nt, Artificial Sequence
  HTT spacer sequence TTCN PAM
cugaugguaguuuguauuuc

SEQ ID NO: 35725 - RNA, 20 nt, Artificial Sequence
  HTT spacer sequence TTCN PAM
gugggaucgguggugauauc

SEQ ID NO: 35726 - RNA, 20 nt, Artificial Sequence
  HTT spacer sequence TTCN PAM
ucucucuuuucuucuuuauu

SEQ ID NO: 35727 - RNA, 20 nt, Artificial Sequence
  HTT spacer sequence TTCN PAM
cucuuuucuucuuuauuagu

SEQ ID NO: 35728 - RNA, 20 nt, Artificial Sequence
  HTT spacer sequence TTCN PAM
ucuuuauuagucuugcuagc

SEQ ID NO: 35729 - RNA, 20 nt, Artificial Sequence
  HTT spacer sequence TTCN PAM
uuauuagucuugcuagcggu

SEQ ID NO: 35730 - RNA, 20 nt, Artificial Sequence
  HTT spacer sequence TTCN PAM
aaaaaccagcaccuggauuc

SEQ ID NO: 35731 - RNA, 20 nt, Artificial Sequence
  HTT spacer sequence TTCN PAM
uugauuuuuuuuggaggguu

SEQ ID NO: 35732 - RNA, 20 nt, Artificial Sequence
  HTT spacer sequence TTCN PAM
ugucucuaucuccuucaguu

SEQ ID NO: 35733 - RNA, 20 nt, Artificial Sequence
  HTT spacer sequence TTCN PAM
guucugcucugaucuuaguu

SEQ ID NO: 35734 - RNA, 20 nt, Artificial Sequence
  HTT spacer sequence TTCN PAM
gcucugaucuuaguuauuuu

SEQ ID NO: 35735 - RNA, 20 nt, Artificial Sequence
  HTT spacer sequence TTCN PAM
gcuagcuuuugaauuuguuu

SEQ ID NO: 35736 - RNA, 20 nt, Artificial Sequence
  HTT spacer sequence TTCN PAM
aaagcuagcagaagacaaaa

SEQ ID NO: 35737 - RNA, 20 nt, Artificial Sequence
  HTT spacer sequence TTCN PAM
aguucuuuuaauugugaugu

SEQ ID NO: 35738 - RNA, 20 nt, Artificial Sequence
  HTT spacer sequence TTCN PAM
uuuaauugugauguuagggu

SEQ ID NO: 35739 - RNA, 20 nt, Artificial Sequence
  HTT spacer sequence TTCN PAM
gcuuucucuugugggcauuu

SEQ ID NO: 35740 - RNA, 20 nt, Artificial Sequence
  HTT spacer sequence TTCN PAM
cuugugggcauuuagugcua

SEQ ID NO: 35741 - RNA, 20 nt, Artificial Sequence
  HTT spacer sequence TTCN PAM
cucuacacacugcuuuaaau

SEQ ID NO: 35742 - RNA, 20 nt, Artificial Sequence
  HTT spacer sequence TTCN PAM
gguauguugugucuucguuc

SEQ ID NO: 35743 - RNA, 20 nt, Artificial Sequence
  HTT spacer sequence TTCN PAM
uucucauugguuuccaagaa

SEQ ID NO: 35744 - RNA, 20 nt, Artificial Sequence
  HTT spacer sequence TTCN PAM
cauugguuuccaagaaaauu

SEQ ID NO: 35745 - RNA, 20 nt, Artificial Sequence
  HTT spacer sequence TTCN PAM
aagaaaauuuuuauuucugc

SEQ ID NO: 35746 - RNA, 20 nt, Artificial Sequence
  HTT spacer sequence TTCN PAM
uggaaaccaaugagaacgaa

SEQ ID NO: 35747 - RNA, 20 nt, Artificial Sequence
  HTT spacer sequence TTCN PAM
gccuucauuucguuauuuac

SEQ ID NO: 35748 - RNA, 20 nt, Artificial Sequence
  HTT spacer sequence TTCN PAM
uuucguuauuuacccaguag

SEQ ID NO: 35749 - RNA, 20 nt, Artificial Sequence
  HTT spacer sequence TTCN PAM
uuauuuacccaguagucauu

SEQ ID NO: 35750 - RNA, 20 nt, Artificial Sequence
  HTT spacer sequence TTCN PAM
agagcagguuguucaguuuc

SEQ ID NO: 35751 - RNA, 20 nt, Artificial Sequence
  HTT spacer sequence TTCN PAM
guuuccauguaguugugugg

SEQ ID NO: 35752 - RNA, 20 nt, Artificial Sequence
  HTT spacer sequence TTCN PAM
auguaguugugugguuuuga

SEQ ID NO: 35753 - RNA, 20 nt, Artificial Sequence
  HTT spacer sequence TTCN PAM
caauccugaguucuaauuug

SEQ ID NO: 35754 - RNA, 20 nt, Artificial Sequence
  HTT spacer sequence TTCN PAM
aauuugauugcacugugguc

SEQ ID NO: 35755 - RNA, 20 nt, Artificial Sequence
  HTT spacer sequence TTCN PAM
guucuuuuacauuugcugag

SEQ ID NO: 35756 - RNA, 20 nt, Artificial Sequence
  HTT spacer sequence TTCN PAM
uuuacauuugcugaggagug

SEQ ID NO: 35757 - RNA, 20 nt, Artificial Sequence
  HTT spacer sequence TTCN PAM
aacuauguggucaguuuuag

SEQ ID NO: 35758 - RNA, 20 nt, Artificial Sequence
  HTT spacer sequence TTCN PAM
aaaacugaccacauaguugg

SEQ ID NO: 35759 - RNA, 20 nt, Artificial Sequence
  HTT spacer sequence TTCN PAM
cagcaccacauugcacuuau

SEQ ID NO: 35760 - RNA, 20 nt, Artificial Sequence
  HTT spacer sequence TTCN PAM
ucucagcaccacauugcacu

SEQ ID NO: 35761 - RNA, 20 nt, Artificial Sequence
  HTT spacer sequence TTCN PAM
guugauuuggggugcagagu

SEQ ID NO: 35762 - RNA, 20 nt, Artificial Sequence
  HTT spacer sequence TTCN PAM
guagaugucuauuagguccg

SEQ ID NO: 35763 - RNA, 20 nt, Artificial Sequence
  HTT spacer sequence TTCN PAM
aguccuggauauccuuguua

SEQ ID NO: 35764 - RNA, 20 nt, Artificial Sequence
  HTT spacer sequence TTCN PAM
ggcucauugaucugccuaau

SEQ ID NO: 35765 - RNA, 20 nt, Artificial Sequence
  HTT spacer sequence TTCN PAM
uagagaccuacaaagagacu

SEQ ID NO: 35766 - RNA, 20 nt, Artificial Sequence
  HTT spacer sequence TTCN PAM
ugaaucugggugcuccugua

SEQ ID NO: 35767 - RNA, 20 nt, Artificial Sequence
  HTT spacer sequence TTCN PAM
ugaagcaaguucuuagagac

SEQ ID NO: 35768 - RNA, 20 nt, Artificial Sequence
  HTT spacer sequence TTCN PAM
uguugaauugaucccuuuac

SEQ ID NO: 35769 - RNA, 20 nt, Artificial Sequence
  HTT spacer sequence TTCN PAM
acaagaagagcuaacuaucc

SEQ ID NO: 35770 - RNA, 20 nt, Artificial Sequence
  HTT spacer sequence TTCN PAM
uugucuccuuugaacuuugu

SEQ ID NO: 35771 - RNA, 20 nt, Artificial Sequence
  HTT spacer sequence TTCN PAM
aaggagacaaagaaggccau

SEQ ID NO: 35772 - RNA, 20 nt, Artificial Sequence
  HTT spacer sequence TTCN PAM
auuugcuuguuagaucuucc

SEQ ID NO: 35773 - RNA, 20 nt, Artificial Sequence
  HTT spacer sequence TTCN PAM
uccaucccuuuauuuugagc

SEQ ID NO: 35774 - RNA, 20 nt, Artificial Sequence
  HTT spacer sequence TTCN PAM
ggagacccaucucacaugca

SEQ ID NO: 35775 - RNA, 20 nt, Artificial Sequence
  HTT spacer sequence TTCN PAM
cacauagcaauauuaaccuu

SEQ ID NO: 35776 - RNA, 20 nt, Artificial Sequence
  HTT spacer sequence TTCN PAM
ucauagcgucaguagucuuu

SEQ ID NO: 35777 - RNA, 20 nt, Artificial Sequence
  HTT spacer sequence TTCN PAM
uagcgucaguagucuuuaca

SEQ ID NO: 35778 - RNA, 20 nt, Artificial Sequence
  HTT spacer sequence TTCN PAM
uuuccauguuuagugcuucc

SEQ ID NO: 35779 - RNA, 20 nt, Artificial Sequence
  HTT spacer sequence TTCN PAM
auguuuagugcuuccuucag

SEQ ID NO: 35780 - RNA, 20 nt, Artificial Sequence
  HTT spacer sequence TTCN PAM
uucaggagcucuuguaaggc

SEQ ID NO: 35781 - RNA, 20 nt, Artificial Sequence
  HTT spacer sequence TTCN PAM
ggagcucuuguaaggcaggc

SEQ ID NO: 35782 - RNA, 20 nt, Artificial Sequence
  HTT spacer sequence TTCN PAM
cguucacuuaugaagcuuag

SEQ ID NO: 35783 - RNA, 20 nt, Artificial Sequence
  HTT spacer sequence TTCN PAM
cuuaugaagcuuaguuuggc

SEQ ID NO: 35784 - RNA, 20 nt, Artificial Sequence
  HTT spacer sequence TTCN PAM
uaagugaacgagaaauaaaa

SEQ ID NO: 35785 - RNA, 20 nt, Artificial Sequence
  HTT spacer sequence TTCN PAM
uauccagccaaacuaagcuu

SEQ ID NO: 35786 - RNA, 20 nt, Artificial Sequence
  HTT spacer sequence TTCN PAM
ggguugaaaauacuuuuuuu

SEQ ID NO: 35787 - RNA, 20 nt, Artificial Sequence
  HTT spacer sequence TTCN PAM
acccagaauuucauauccag

SEQ ID NO: 35788 - RNA, 20 nt, Artificial Sequence
  HTT spacer sequence TTCN PAM
uuaaaaaaaguauuuucaac

SEQ ID NO: 35789 - RNA, 20 nt, Artificial Sequence
  HTT spacer sequence TTCN PAM
acauucuuuaaaaaaaguau

SEQ ID NO: 35790 - RNA, 20 nt, Artificial Sequence
  HTT spacer sequence TTCN PAM
ggcuuguaggauuucugcag

SEQ ID NO: 35791 - RNA, 20 nt, Artificial Sequence
  HTT spacer sequence TTCN PAM
gcagagagaucugcuguuag

SEQ ID NO: 35792 - RNA, 20 nt, Artificial Sequence
  HTT spacer sequence TTCN PAM
cuuuguggguaacccgaccu

SEQ ID NO: 35793 - RNA, 20 nt, Artificial Sequence
  HTT spacer sequence TTCN PAM
cucuggcugcccuuuccuuc

SEQ ID NO: 35794 - RNA, 20 nt, Artificial Sequence
  HTT spacer sequence TTCN PAM
uucauuucaaucuuggugga

SEQ ID NO: 35795 - RNA, 20 nt, Artificial Sequence
  HTT spacer sequence TTCN PAM
uuucaaucuugguggaucug

SEQ ID NO: 35796 - RNA, 20 nt, Artificial Sequence
  HTT spacer sequence TTCN PAM
aucuugguggaucugaugau

SEQ ID NO: 35797 - RNA, 20 nt, Artificial Sequence
  HTT spacer sequence TTCN PAM
cgaggaguaucuuuguggug

SEQ ID NO: 35798 - RNA, 20 nt, Artificial Sequence
  HTT spacer sequence TTCN PAM
cuguauuuccugaauuugaa

SEQ ID NO: 35799 - RNA, 20 nt, Artificial Sequence
  HTT spacer sequence TTCN PAM
ugaauuugaauguuggucug

SEQ ID NO: 35800 - RNA, 20 nt, Artificial Sequence
  HTT spacer sequence TTCN PAM
ggaaauacagagaacaccac

SEQ ID NO: 35801 - RNA, 20 nt, Artificial Sequence
  HTT spacer sequence TTCN PAM
aauucaggaaauacagagaa

SEQ ID NO: 35802 - RNA, 20 nt, Artificial Sequence
  HTT spacer sequence TTCN PAM
ccaaccuagcaaggcagacc

SEQ ID NO: 35803 - RNA, 20 nt, Artificial Sequence
  HTT spacer sequence TTCN PAM
ccuggauaauauccugaaga

SEQ ID NO: 35804 - RNA, 20 nt, Artificial Sequence
  HTT spacer sequence TTCN PAM
ggauauuauccaggagaacu

SEQ ID NO: 35805 - RNA, 20 nt, Artificial Sequence
  HTT spacer sequence TTCN PAM
aacuugguucuauucucccc

SEQ ID NO: 35806 - RNA, 20 nt, Artificial Sequence
  HTT spacer sequence TTCN PAM
auucuccccaucacuuucag

SEQ ID NO: 35807 - RNA, 20 nt, Artificial Sequence
  HTT spacer sequence TTCN PAM
ccccaucacuuucagguaca

SEQ ID NO: 35808 - RNA, 20 nt, Artificial Sequence
  HTT spacer sequence TTCN PAM
gguacaccaaucaaacguag

SEQ ID NO: 35809 - RNA, 20 nt, Artificial Sequence
  HTT spacer sequence TTCN PAM
cauagucccauauuucuugg

SEQ ID NO: 35810 - RNA, 20 nt, Artificial Sequence
  HTT spacer sequence TTCN PAM
uggaggcuugguucauuucu

SEQ ID NO: 35811 - RNA, 20 nt, Artificial Sequence
  HTT spacer sequence TTCN PAM
uuucuuuucacucuuuuuuc

SEQ ID NO: 35812 - RNA, 20 nt, Artificial Sequence
  HTT spacer sequence TTCN PAM
uuucacucuuuuuucucuaa

SEQ ID NO: 35813 - RNA, 20 nt, Artificial Sequence
  HTT spacer sequence TTCN PAM
cucuuuuuucucuaaucuug

SEQ ID NO: 35814 - RNA, 20 nt, Artificial Sequence
  HTT spacer sequence TTCN PAM
cuaaucuugucuucucgcuu

SEQ ID NO: 35815 - RNA, 20 nt, Artificial Sequence
  HTT spacer sequence TTCN PAM
cgcuuuauuucauuaauuug

SEQ ID NO: 35816 - RNA, 20 nt, Artificial Sequence
  HTT spacer sequence TTCN PAM
uuaauuugaucuucaaucac

SEQ ID NO: 35817 - RNA, 20 nt, Artificial Sequence
  HTT spacer sequence TTCN PAM
aucacugauauccuuucuuc

SEQ ID NO: 35818 - RNA, 20 nt, Artificial Sequence
  HTT spacer sequence TTCN PAM
ucugcuugauugaaucggcu

SEQ ID NO: 35819 - RNA, 20 nt, Artificial Sequence
  HTT spacer sequence TTCN PAM
gcuugauugaaucggcuguc

SEQ ID NO: 35820 - RNA, 20 nt, Artificial Sequence
  HTT spacer sequence TTCN PAM
aucaagcagaagaaaggaua

SEQ ID NO: 35821 - RNA, 20 nt, Artificial Sequence
  HTT spacer sequence TTCN PAM
acagccgauucaaucaagca

SEQ ID NO: 35822 - RNA, 20 nt, Artificial Sequence
  HTT spacer sequence TTCN PAM
caaaauucucguucuguggu

SEQ ID NO: 35823 - RNA, 20 nt, Artificial Sequence
  HTT spacer sequence TTCN PAM
cguucugugguuuuuagcuc

SEQ ID NO: 35824 - RNA, 20 nt, Artificial Sequence
  HTT spacer sequence TTCN PAM
gugguuuuuagcuccaucag

SEQ ID NO: 35825 - RNA, 20 nt, Artificial Sequence
  HTT spacer sequence TTCN PAM
cuacacugguuauucuagcc

SEQ ID NO: 35826 - RNA, 20 nt, Artificial Sequence
  HTT spacer sequence TTCN PAM
agccauuagucuaacauuuu

SEQ ID NO: 35827 - RNA, 20 nt, Artificial Sequence
  HTT spacer sequence TTCN PAM
agguuuuuagcuuccuugug

SEQ ID NO: 35828 - RNA, 20 nt, Artificial Sequence
  HTT spacer sequence TTCN PAM
uugugauggguuagaacaug

SEQ ID NO: 35829 - RNA, 20 nt, Artificial Sequence
  HTT spacer sequence TTCN PAM
aacccaucacaaggaagcua

SEQ ID NO: 35830 - RNA, 20 nt, Artificial Sequence
  HTT spacer sequence TTCN PAM
ccgagcuaaaggagcauguu

SEQ ID NO: 35831 - RNA, 20 nt, Artificial Sequence
  HTT spacer sequence TTCN PAM
gaagccuacuucugucaauu

SEQ ID NO: 35832 - RNA, 20 nt, Artificial Sequence
  HTT spacer sequence TTCN PAM
gaaggucgguaauaacaaac

SEQ ID NO: 35833 - RNA, 20 nt, Artificial Sequence
  HTT spacer sequence TTCN PAM
gucaauucaucaaacucauu

SEQ ID NO: 35834 - RNA, 20 nt, Artificial Sequence
  HTT spacer sequence TTCN PAM
ucaaacucauucuccaucca

SEQ ID NO: 35835 - RNA, 20 nt, Artificial Sequence
  HTT spacer sequence TTCN PAM
ccauccaguuuuguucccuu

SEQ ID NO: 35836 - RNA, 20 nt, Artificial Sequence
  HTT spacer sequence TTCN PAM
cuugcuggugaggaguugug

SEQ ID NO: 35837 - RNA, 20 nt, Artificial Sequence
  HTT spacer sequence TTCN PAM
ccuccaaaggaucacaacuc

SEQ ID NO: 35838 - RNA, 20 nt, Artificial Sequence
  HTT spacer sequence TTCN PAM
gguuuuuggaauuuucagcc

SEQ ID NO: 35839 - RNA, 20 nt, Artificial Sequence
  HTT spacer sequence TTCN PAM
aaaaaccagaacaccucuuc

SEQ ID NO: 35840 - RNA, 20 nt, Artificial Sequence
  HTT spacer sequence TTCN PAM
gccuuucugcuaugguuucu

SEQ ID NO: 35841 - RNA, 20 nt, Artificial Sequence
  HTT spacer sequence TTCN PAM
gcuaugguuucuccccauca

SEQ ID NO: 35842 - RNA, 20 nt, Artificial Sequence
  HTT spacer sequence TTCN PAM
ccccaucauugugguuuuau

SEQ ID NO: 35843 - RNA, 20 nt, Artificial Sequence
  HTT spacer sequence TTCN PAM
uuucuguuuguuaguuuucc

SEQ ID NO: 35844 - RNA, 20 nt, Artificial Sequence
  HTT spacer sequence TTCN PAM
guuuguuaguuuuccuucua

SEQ ID NO: 35845 - RNA, 20 nt, Artificial Sequence
  HTT spacer sequence TTCN PAM
uucuaacagacaggccccuc

SEQ ID NO: 35846 - RNA, 20 nt, Artificial Sequence
  HTT spacer sequence TTCN PAM
aacagacaggccccucagcu

SEQ ID NO: 35847 - RNA, 20 nt, Artificial Sequence
  HTT spacer sequence TTCN PAM
gcagccucugcuggugaugc

SEQ ID NO: 35848 - RNA, 20 nt, Artificial Sequence
  HTT spacer sequence TTCN PAM
ucuggaaacaucgucccaga

SEQ ID NO: 35849 - RNA, 20 nt, Artificial Sequence
  HTT spacer sequence TTCN PAM
agaggaaggaucaggcagca

SEQ ID NO: 35850 - RNA, 20 nt, Artificial Sequence
  HTT spacer sequence TTCN PAM
ugcucugggacgauguuucc

SEQ ID NO: 35851 - RNA, 20 nt, Artificial Sequence
  HTT spacer sequence TTCN PAM
uuaucggagcuugaaugccg

SEQ ID NO: 35852 - RNA, 20 nt, Artificial Sequence
  HTT spacer sequence TTCN PAM
agcuccgauaaugaacagac

SEQ ID NO: 35853 - RNA, 20 nt, Artificial Sequence
  HTT spacer sequence TTCN PAM
cccgguacggcauucaagcu

SEQ ID NO: 35854 - RNA, 20 nt, Artificial Sequence
  HTT spacer sequence TTCN PAM
gagcugucaggcacguaugu

SEQ ID NO: 35855 - RNA, 20 nt, Artificial Sequence
  HTT spacer sequence TTCN PAM
ccagauuuaaacauacgugc

SEQ ID NO: 35856 - RNA, 20 nt, Artificial Sequence
  HTT spacer sequence TTCN PAM
gaugugcccuucccccagag

SEQ ID NO: 35857 - RNA, 20 nt, Artificial Sequence
  HTT spacer sequence TTCN PAM
cccagagguggaaucuagag

SEQ ID NO: 35858 - RNA, 20 nt, Artificial Sequence
  HTT spacer sequence TTCN PAM
accucugggggaagggcaca

SEQ ID NO: 35859 - RNA, 20 nt, Artificial Sequence
  HTT spacer sequence TTCN PAM
agcuucccugcugcuuuguu

SEQ ID NO: 35860 - RNA, 20 nt, Artificial Sequence
  HTT spacer sequence TTCN PAM
cugcugcuuuguuuacacug

SEQ ID NO: 35861 - RNA, 20 nt, Artificial Sequence
  HTT spacer sequence TTCN PAM
augcucacaguguaaacaaa

SEQ ID NO: 35862 - RNA, 20 nt, Artificial Sequence
  HTT spacer sequence TTCN PAM
gagugcugcgcuagcaguga

SEQ ID NO: 35863 - RNA, 20 nt, Artificial Sequence
  HTT spacer sequence TTCN PAM
cuccugugccuggcucagcg

SEQ ID NO: 35864 - RNA, 20 nt, Artificial Sequence
  HTT spacer sequence TTCN PAM
caaccagcagaccaggagau

SEQ ID NO: 35865 - RNA, 20 nt, Artificial Sequence
  HTT spacer sequence TTCN PAM
cacagucuucacaaccagca

SEQ ID NO: 35866 - RNA, 20 nt, Artificial Sequence
  HTT spacer sequence TTCN PAM
gguacagucacucauggcuu

SEQ ID NO: 35867 - RNA, 20 nt, Artificial Sequence
  HTT spacer sequence TTCN PAM
uuuggcuuggaaagggaagu

SEQ ID NO: 35868 - RNA, 20 nt, Artificial Sequence
  HTT spacer sequence TTCN PAM
aagccaaaggaagccaugag

SEQ ID NO: 35869 - RNA, 20 nt, Artificial Sequence
  HTT spacer sequence TTCN PAM
cuuuccaagccaaaggaagc

SEQ ID NO: 35870 - RNA, 20 nt, Artificial Sequence
  HTT spacer sequence TTCN PAM
caggugaggcaacaccccgc

SEQ ID NO: 35871 - RNA, 20 nt, Artificial Sequence
  HTT spacer sequence TTCN PAM
gcuugcccuccgugggcugc

SEQ ID NO: 35872 - RNA, 20 nt, Artificial Sequence
  HTT spacer sequence TTCN PAM
ucucacugggacuugcugga

SEQ ID NO: 35873 - RNA, 20 nt, Artificial Sequence
  HTT spacer sequence TTCN PAM
aacugagguaccuaguucau

SEQ ID NO: 35874 - RNA, 20 nt, Artificial Sequence
  HTT spacer sequence TTCN PAM
gcauuuccaacugagguacc

SEQ ID NO: 35875 - RNA, 20 nt, Artificial Sequence
  HTT spacer sequence TTCN PAM
gugucgaucucacugggagc

SEQ ID NO: 35876 - RNA, 20 nt, Artificial Sequence
  HTT spacer sequence TTCN PAM
uauucggccauuuuggaagc

SEQ ID NO: 35877 - RNA, 20 nt, Artificial Sequence
  HTT spacer sequence TTCN PAM
gccauuuuggaagcaucccu

SEQ ID NO: 35878 - RNA, 20 nt, Artificial Sequence
  HTT spacer sequence TTCN PAM
aaaauggccgaauaggaaca

SEQ ID NO: 35879 - RNA, 20 nt, Artificial Sequence
  HTT spacer sequence TTCN PAM
agcgauucuccuaccucagc

SEQ ID NO: 35880 - RNA, 20 nt, Artificial Sequence
  HTT spacer sequence TTCN PAM
ccuaccucagccuccggagu

SEQ ID NO: 35881 - RNA, 20 nt, Artificial Sequence
  HTT spacer sequence TTCN PAM
ccacauuggccaggcuaguc

SEQ ID NO: 35882 - RNA, 20 nt, Artificial Sequence
  HTT spacer sequence TTCN PAM
agacuagccuggccaaugug

SEQ ID NO: 35883 - RNA, 20 nt, Artificial Sequence
  HTT spacer sequence TTCN PAM
gaucucccucucuuugcccu

SEQ ID NO: 35884 - RNA, 20 nt, Artificial Sequence
  HTT spacer sequence TTCN PAM
auuuugcuaaaauguguuau

SEQ ID NO: 35885 - RNA, 20 nt, Artificial Sequence
  HTT spacer sequence TTCN PAM
aauuuaaaacauauaguauu

SEQ ID NO: 35886 - RNA, 20 nt, Artificial Sequence
  HTT spacer sequence TTCN PAM
guauaaucucacguucaaau

SEQ ID NO: 35887 - RNA, 20 nt, Artificial Sequence
  HTT spacer sequence TTCN PAM
uuaaauaguaagauuuucuu

SEQ ID NO: 35888 - RNA, 20 nt, Artificial Sequence
  HTT spacer sequence TTCN PAM
uuuuuguauguggguuuuuu

SEQ ID NO: 35889 - RNA, 20 nt, Artificial Sequence
  HTT spacer sequence TTCN PAM
auauaugacagucauaauaa

SEQ ID NO: 35890 - RNA, 20 nt, Artificial Sequence
  HTT spacer sequence TTCN PAM
guuacagucagugaauguau

SEQ ID NO: 35891 - RNA, 20 nt, Artificial Sequence
  HTT spacer sequence TTCN PAM
cugacuguaacugaaaaaca

SEQ ID NO: 35892 - RNA, 20 nt, Artificial Sequence
  HTT spacer sequence TTCN PAM
uuaaauugugacuuauuaau

SEQ ID NO: 35893 - RNA, 20 nt, Artificial Sequence
  HTT spacer sequence TTCN PAM
ugaaaucagccauaugguug

SEQ ID NO: 35894 - RNA, 20 nt, Artificial Sequence
  HTT spacer sequence TTCN PAM
agaauauaaagaucaacuaa

SEQ ID NO: 35895 - RNA, 20 nt, Artificial Sequence
  HTT spacer sequence TTCN PAM
gagaugagcuuauuaucuuu

SEQ ID NO: 35896 - RNA, 20 nt, Artificial Sequence
  HTT spacer sequence TTCN PAM
uaugccaaauguaaaaauuu

SEQ ID NO: 35897 - RNA, 20 nt, Artificial Sequence
  HTT spacer sequence TTCN PAM
cuggccugugucuuuacagu

SEQ ID NO: 35898 - RNA, 20 nt, Artificial Sequence
  HTT spacer sequence TTCN PAM
aaguucaucuuuuuugcugu

SEQ ID NO: 35899 - RNA, 20 nt, Artificial Sequence
  HTT spacer sequence TTCN PAM
ucuuuuuugcuguuucaaga

SEQ ID NO: 35900 - RNA, 20 nt, Artificial Sequence
  HTT spacer sequence TTCN PAM
agacagaggcccauuuuagc

SEQ ID NO: 35901 - RNA, 20 nt, Artificial Sequence
  HTT spacer sequence TTCN PAM
cgcauauccuuuuguuugua

SEQ ID NO: 35902 - RNA, 20 nt, Artificial Sequence
  HTT spacer sequence TTCN PAM
aaaguacaaacaaaaggaua

SEQ ID NO: 35903 - RNA, 20 nt, Artificial Sequence
  HTT spacer sequence TTCN PAM
acccuacauaucccccucua

SEQ ID NO: 35904 - RNA, 20 nt, Artificial Sequence
  HTT spacer sequence TTCN PAM
cagguucuuguuugcacuug

SEQ ID NO: 35905 - RNA, 20 nt, Artificial Sequence
  HTT spacer sequence TTCN PAM
uguuugcacuuggccccuga

SEQ ID NO: 35906 - RNA, 20 nt, Artificial Sequence
  HTT spacer sequence TTCN PAM
ucaaaacagucaggggccaa

SEQ ID NO: 35907 - RNA, 20 nt, Artificial Sequence
  HTT spacer sequence TTCN PAM
gaucucuuucugccacacag

SEQ ID NO: 35908 - RNA, 20 nt, Artificial Sequence
  HTT spacer sequence TTCN PAM
gccacacagcaguucugagg

SEQ ID NO: 35909 - RNA, 20 nt, Artificial Sequence
  HTT spacer sequence TTCN PAM
gaggcagcuggaaagauauc

SEQ ID NO: 35910 - RNA, 20 nt, Artificial Sequence
  HTT spacer sequence TTCN PAM
agcugccucagaacugcugu

SEQ ID NO: 35911 - RNA, 20 nt, Artificial Sequence
  HTT spacer sequence TTCN PAM
ccuaagcaaggucacagaua

SEQ ID NO: 35912 - RNA, 20 nt, Artificial Sequence
  HTT spacer sequence TTCN PAM
ucagacuucugugaguuuac

SEQ ID NO: 35913 - RNA, 20 nt, Artificial Sequence
  HTT spacer sequence TTCN PAM
gacuucugugaguuuaccua

SEQ ID NO: 35914 - RNA, 20 nt, Artificial Sequence
  HTT spacer sequence TTCN PAM
gugaguuuaccuaguuccag

SEQ ID NO: 35915 - RNA, 20 nt, Artificial Sequence
  HTT spacer sequence TTCN PAM
aggauuuaaaggcacagaga

SEQ ID NO: 35916 - RNA, 20 nt, Artificial Sequence
  HTT spacer sequence TTCN PAM
aaagucucugugccuuuaaa

SEQ ID NO: 35917 - RNA, 20 nt, Artificial Sequence
  HTT spacer sequence TTCN PAM
auuuuaauucuaaagucucu

SEQ ID NO: 35918 - RNA, 20 nt, Artificial Sequence
  HTT spacer sequence TTCN PAM
uuuucuaaauagcaacacua

SEQ ID NO: 35919 - RNA, 20 nt, Artificial Sequence
  HTT spacer sequence TTCN PAM
aaauagcaacacuaggaaua

SEQ ID NO: 35920 - RNA, 20 nt, Artificial Sequence
  HTT spacer sequence TTCN PAM
uaguguugcuauuuagaaaa

SEQ ID NO: 35921 - RNA, 20 nt, Artificial Sequence
  HTT spacer sequence TTCN PAM
acauucuugacagguaaugu

SEQ ID NO: 35922 - RNA, 20 nt, Artificial Sequence
  HTT spacer sequence TTCN PAM
ugacagguaauguuuuuucu

SEQ ID NO: 35923 - RNA, 20 nt, Artificial Sequence
  HTT spacer sequence TTCN PAM
ugucuucuaauccuuauuua

SEQ ID NO: 35924 - RNA, 20 nt, Artificial Sequence
  HTT spacer sequence TTCN PAM
aauccuuauuuauuccauac

SEQ ID NO: 35925 - RNA, 20 nt, Artificial Sequence
  HTT spacer sequence TTCN PAM
auacucauuuuuauacauaa

SEQ ID NO: 35926 - RNA, 20 nt, Artificial Sequence
  HTT spacer sequence TTCN PAM
auuauguauaaaaaugagua

SEQ ID NO: 35927 - RNA, 20 nt, Artificial Sequence
  HTT spacer sequence TTCN PAM
uuugcauuauauuauagacg

SEQ ID NO: 35928 - RNA, 20 nt, Artificial Sequence
  HTT spacer sequence TTCN PAM
uguaacuccuuacuguucca

SEQ ID NO: 35929 - RNA, 20 nt, Artificial Sequence
  HTT spacer sequence TTCN PAM
auuuuauauguuuugucugg

SEQ ID NO: 35930 - RNA, 20 nt, Artificial Sequence
  HTT spacer sequence TTCN PAM
cgguuugcagauaaagucuu

SEQ ID NO: 35931 - RNA, 20 nt, Artificial Sequence
  HTT spacer sequence TTCN PAM
uuuuguagagacaguuuccc

SEQ ID NO: 35932 - RNA, 20 nt, Artificial Sequence
  HTT spacer sequence TTCN PAM
ugugccuggguuuauugagg

SEQ ID NO: 35933 - RNA, 20 nt, Artificial Sequence
  HTT spacer sequence TTCN PAM
uaguauuuuuaaaguuugga

SEQ ID NO: 35934 - RNA, 20 nt, Artificial Sequence
  HTT spacer sequence TTCN PAM
aaacuuuaaaaauacuauga

SEQ ID NO: 35935 - RNA, 20 nt, Artificial Sequence
  HTT spacer sequence TTCN PAM
uucuuucuuucuuucuuuuu

SEQ ID NO: 35936 - RNA, 20 nt, Artificial Sequence
  HTT spacer sequence TTCN PAM
uucuuucuuucuuuuuuuuu

SEQ ID NO: 35937 - RNA, 20 nt, Artificial Sequence
  HTT spacer sequence TTCN PAM
uucuuucuuuuuuuuuuuuu

SEQ ID NO: 35938 - RNA, 20 nt, Artificial Sequence
  HTT spacer sequence TTCN PAM
uucuuuuuuuuuuuuuugag

SEQ ID NO: 35939 - RNA, 20 nt, Artificial Sequence
  HTT spacer sequence TTCN PAM
uuuuuuuuuuuuugagacag

SEQ ID NO: 35940 - RNA, 20 nt, Artificial Sequence
  HTT spacer sequence TTCN PAM
cgccauucuccugccucagc

SEQ ID NO: 35941 - RNA, 20 nt, Artificial Sequence
  HTT spacer sequence TTCN PAM
ccugccucagccuccugagu

SEQ ID NO: 35942 - RNA, 20 nt, Artificial Sequence
  HTT spacer sequence TTCN PAM
cuguguuagccaggaugguc

SEQ ID NO: 35943 - RNA, 20 nt, Artificial Sequence
  HTT spacer sequence TTCN PAM
ucaaagauuuuuuuucugcc

SEQ ID NO: 35944 - RNA, 20 nt, Artificial Sequence
  HTT spacer sequence TTCN PAM
aagauuuuuuuucugcccug

SEQ ID NO: 35945 - RNA, 20 nt, Artificial Sequence
  HTT spacer sequence TTCN PAM
gcccugccucccuccuuuuu

SEQ ID NO: 35946 - RNA, 20 nt, Artificial Sequence
  HTT spacer sequence TTCN PAM
cucucuuaaaggggcuguga

SEQ ID NO: 35947 - RNA, 20 nt, Artificial Sequence
  HTT spacer sequence TTCN PAM
ugaaugauugcuuaguguug

SEQ ID NO: 35948 - RNA, 20 nt, Artificial Sequence
  HTT spacer sequence TTCN PAM
ggaaaucacagccccuuuaa

SEQ ID NO: 35949 - RNA, 20 nt, Artificial Sequence
  HTT spacer sequence TTCN PAM
guguuugauuguuuuaugug

SEQ ID NO: 35950 - RNA, 20 nt, Artificial Sequence
  HTT spacer sequence TTCN PAM
guuuuguauaguuucuauua

SEQ ID NO: 35951 - RNA, 20 nt, Artificial Sequence
  HTT spacer sequence TTCN PAM
auuauuguguuuucaaguuc

SEQ ID NO: 35952 - RNA, 20 nt, Artificial Sequence
  HTT spacer sequence TTCN PAM
aguucucugaucuuuucuuc

SEQ ID NO: 35953 - RNA, 20 nt, Artificial Sequence
  HTT spacer sequence TTCN PAM
cugaucuuuucuucuacagu

SEQ ID NO: 35954 - RNA, 20 nt, Artificial Sequence
  HTT spacer sequence TTCN PAM
ucuacagugucuacucuguu

SEQ ID NO: 35955 - RNA, 20 nt, Artificial Sequence
  HTT spacer sequence TTCN PAM
acagugucuacucuguuguu

SEQ ID NO: 35956 - RNA, 20 nt, Artificial Sequence
  HTT spacer sequence TTCN PAM
aaaacaaaaaaaaaaauacg

SEQ ID NO: 35957 - RNA, 20 nt, Artificial Sequence
  HTT spacer sequence TTCN PAM
ucugccucagccucccgagu

SEQ ID NO: 35958 - RNA, 20 nt, Artificial Sequence
  HTT spacer sequence TTCN PAM
gccucagccucccgaguagc

SEQ ID NO: 35959 - RNA, 20 nt, Artificial Sequence
  HTT spacer sequence TTCN PAM
ccauguuggccaaacuggcc

SEQ ID NO: 35960 - RNA, 20 nt, Artificial Sequence
  HTT spacer sequence TTCN PAM
aggccaguuuggccaacaug

SEQ ID NO: 35961 - RNA, 20 nt, Artificial Sequence
  HTT spacer sequence TTCN PAM
uccgccucggucucccaaag

SEQ ID NO: 35962 - RNA, 20 nt, Artificial Sequence
  HTT spacer sequence TTCN PAM
guguauaucacuaauuuugu

SEQ ID NO: 35963 - RNA, 20 nt, Artificial Sequence
  HTT spacer sequence TTCN PAM
agagauaaaaacaaaauuag

SEQ ID NO: 35964 - RNA, 20 nt, Artificial Sequence
  HTT spacer sequence TTCN PAM
guuuagcuuugugaacacaa

SEQ ID NO: 35965 - RNA, 20 nt, Artificial Sequence
  HTT spacer sequence TTCN PAM
caaagcuaaacagaaacaca

SEQ ID NO: 35966 - RNA, 20 nt, Artificial Sequence
  HTT spacer sequence TTCN PAM
cugcuaguucuaagaucuuc

SEQ ID NO: 35967 - RNA, 20 nt, Artificial Sequence
  HTT spacer sequence TTCN PAM
aagaucuucuaauaacuucc

SEQ ID NO: 35968 - RNA, 20 nt, Artificial Sequence
  HTT spacer sequence TTCN PAM
aauaacuucccaguucuugg

SEQ ID NO: 35969 - RNA, 20 nt, Artificial Sequence
  HTT spacer sequence TTCN PAM
caguucuugguguuucucau

SEQ ID NO: 35970 - RNA, 20 nt, Artificial Sequence
  HTT spacer sequence TTCN PAM
ugguguuucucauugguuga

SEQ ID NO: 35971 - RNA, 20 nt, Artificial Sequence
  HTT spacer sequence TTCN PAM
cauugguugauugauacucc

SEQ ID NO: 35972 - RNA, 20 nt, Artificial Sequence
  HTT spacer sequence TTCN PAM
ugccucuuuguauggcugcc

SEQ ID NO: 35973 - RNA, 20 nt, Artificial Sequence
  HTT spacer sequence TTCN PAM
caagguugggcauccaauaa

SEQ ID NO: 35974 - RNA, 20 nt, Artificial Sequence
  HTT spacer sequence TTCN PAM
cauagaucuucuugagcuuu

SEQ ID NO: 35975 - RNA, 20 nt, Artificial Sequence
  HTT spacer sequence TTCN PAM
ugagcuuuguucugagguua

SEQ ID NO: 35976 - RNA, 20 nt, Artificial Sequence
  HTT spacer sequence TTCN PAM
gagguuaguugaguuacaua

SEQ ID NO: 35977 - RNA, 20 nt, Artificial Sequence
  HTT spacer sequence TTCN PAM
ucuuuaggaauaauuaggua

SEQ ID NO: 35978 - RNA, 20 nt, Artificial Sequence
  HTT spacer sequence TTCN PAM
uaaagaggaauaauuagucc

SEQ ID NO: 35979 - RNA, 20 nt, Artificial Sequence
  HTT spacer sequence TTCN PAM
uuagguagaguacucaggau

SEQ ID NO: 35980 - RNA, 20 nt, Artificial Sequence
  HTT spacer sequence TTCN PAM
gguucauuagguagaguacu

SEQ ID NO: 35981 - RNA, 20 nt, Artificial Sequence
  HTT spacer sequence TTCN PAM
aguccgccugcugagaacag

SEQ ID NO: 35982 - RNA, 20 nt, Artificial Sequence
  HTT spacer sequence TTCN PAM
cagcaggcggacuggaaaac

SEQ ID NO: 35983 - RNA, 20 nt, Artificial Sequence
  HTT spacer sequence TTCN PAM
agcccugugugagcgcugag

SEQ ID NO: 35984 - RNA, 20 nt, Artificial Sequence
  HTT spacer sequence TTCN PAM
aauccuuuccaaugcuucuu

SEQ ID NO: 35985 - RNA, 20 nt, Artificial Sequence
  HTT spacer sequence TTCN PAM
aaugcuucuuucccuggccu

SEQ ID NO: 35986 - RNA, 20 nt, Artificial Sequence
  HTT spacer sequence TTCN PAM
uucccuggccucagggaguu

SEQ ID NO: 35987 - RNA, 20 nt, Artificial Sequence
  HTT spacer sequence TTCN PAM
cuggccucagggaguuuucu

SEQ ID NO: 35988 - RNA, 20 nt, Artificial Sequence
  HTT spacer sequence TTCN PAM
cacacacauaucucugcuga

SEQ ID NO: 35989 - RNA, 20 nt, Artificial Sequence
  HTT spacer sequence TTCN PAM
ccagaucuccagagcucucu

SEQ ID NO: 35990 - RNA, 20 nt, Artificial Sequence
  HTT spacer sequence TTCN PAM
cuucucuggugcucugucuu

SEQ ID NO: 35991 - RNA, 20 nt, Artificial Sequence
  HTT spacer sequence TTCN PAM
cuggugcucugucuuaugaa

SEQ ID NO: 35992 - RNA, 20 nt, Artificial Sequence
  HTT spacer sequence TTCN PAM
uaagacagagcaccagagaa

SEQ ID NO: 35993 - RNA, 20 nt, Artificial Sequence
  HTT spacer sequence TTCN PAM
cagcaccucuucaauucaga

SEQ ID NO: 35994 - RNA, 20 nt, Artificial Sequence
  HTT spacer sequence TTCN PAM
auucagaggguugccugucc

SEQ ID NO: 35995 - RNA, 20 nt, Artificial Sequence
  HTT spacer sequence TTCN PAM
gaggguugccugucccuccu

SEQ ID NO: 35996 - RNA, 20 nt, Artificial Sequence
  HTT spacer sequence TTCN PAM
uaggcuguggcacaaggagg

SEQ ID NO: 35997 - RNA, 20 nt, Artificial Sequence
  HTT spacer sequence TTCN PAM
uugcucauguccagugucuu

SEQ ID NO: 35998 - RNA, 20 nt, Artificial Sequence
  HTT spacer sequence TTCN PAM
acuacugagcacaaugaggg

SEQ ID NO: 35999 - RNA, 20 nt, Artificial Sequence
  HTT spacer sequence TTCN PAM
cugguacuuggggagcucuu

SEQ ID NO: 36000 - RNA, 20 nt, Artificial Sequence
  HTT spacer sequence TTCN PAM
agagcuccccaaguaccagg

SEQ ID NO: 36001 - RNA, 20 nt, Artificial Sequence
  HTT spacer sequence TTCN PAM
ggccuuucaagagcucccca

SEQ ID NO: 36002 - RNA, 20 nt, Artificial Sequence
  HTT spacer sequence TTCN PAM
caccuuuuccagggcuucag

SEQ ID NO: 36003 - RNA, 20 nt, Artificial Sequence
  HTT spacer sequence TTCN PAM
agggcuucaguuucuggugc

SEQ ID NO: 36004 - RNA, 20 nt, Artificial Sequence
  HTT spacer sequence TTCN PAM
guuucuggugcacaucaagc

SEQ ID NO: 36005 - RNA, 20 nt, Artificial Sequence
  HTT spacer sequence TTCN PAM
ggugcacaucaagcauucca

SEQ ID NO: 36006 - RNA, 20 nt, Artificial Sequence
  HTT spacer sequence TTCN PAM
auacacauuuguuaaagucc

SEQ ID NO: 36007 - RNA, 20 nt, Artificial Sequence
  HTT spacer sequence TTCN PAM
cagguucuauuuguaauuuu

SEQ ID NO: 36008 - RNA, 20 nt, Artificial Sequence
  HTT spacer sequence TTCN PAM
auuuguaauuuuuucaguua

SEQ ID NO: 36009 - RNA, 20 nt, Artificial Sequence
  HTT spacer sequence TTCN PAM
guuaacauguauuggguauc

SEQ ID NO: 36010 - RNA, 20 nt, Artificial Sequence
  HTT spacer sequence TTCN PAM
auucugacaagaacaaccuu

SEQ ID NO: 36011 - RNA, 20 nt, Artificial Sequence
  HTT spacer sequence TTCN PAM
gacaagaacaaccuuaaaca

SEQ ID NO: 36012 - RNA, 20 nt, Artificial Sequence
  HTT spacer sequence TTCN PAM
ugucagaauugaauuuguca

SEQ ID NO: 36013 - RNA, 20 nt, Artificial Sequence
  HTT spacer sequence TTCN PAM
aaguguuuaagguuguucuu

SEQ ID NO: 36014 - RNA, 20 nt, Artificial Sequence
  HTT spacer sequence TTCN PAM
gauaugcucaaaguauauuc

SEQ ID NO: 36015 - RNA, 20 nt, Artificial Sequence
  HTT spacer sequence TTCN PAM
aauacucaagggccacacau

SEQ ID NO: 36016 - RNA, 20 nt, Artificial Sequence
  HTT spacer sequence TTCN PAM
uguugguuucaaauacucaa

SEQ ID NO: 36017 - RNA, 20 nt, Artificial Sequence
  HTT spacer sequence TTCN PAM
gucuaauugguguuggcuuu

SEQ ID NO: 36018 - RNA, 20 nt, Artificial Sequence
  HTT spacer sequence TTCN PAM
aucagcugcuaaaagccaac

SEQ ID NO: 36019 - RNA, 20 nt, Artificial Sequence
  HTT spacer sequence TTCN PAM
ugauuagccaggcaguggug

SEQ ID NO: 36020 - RNA, 20 nt, Artificial Sequence
  HTT spacer sequence TTCN PAM
ccacugccuggcuaaucacg

SEQ ID NO: 36021 - RNA, 20 nt, Artificial Sequence
  HTT spacer sequence TTCN PAM
gaaugccuagguaucuaggc

SEQ ID NO: 36022 - RNA, 20 nt, Artificial Sequence
  HTT spacer sequence TTCN PAM
gaaugcacagccuguuucac

SEQ ID NO: 36023 - RNA, 20 nt, Artificial Sequence
  HTT spacer sequence TTCN PAM
gaaugguggcgcucuuugag

SEQ ID NO: 36024 - RNA, 20 nt, Artificial Sequence
  HTT spacer sequence TTCN PAM
gaaugccuagauaccuaggc

SEQ ID NO: 36025 - RNA, 20 nt, Artificial Sequence
  HTT spacer sequence TTCN PAM
ucuuucuugauucuuuuuuu

SEQ ID NO: 36026 - RNA, 20 nt, Artificial Sequence
  HTT spacer sequence TTCN PAM
uucuugauucuuuuuuuuuu

SEQ ID NO: 36027 - RNA, 20 nt, Artificial Sequence
  HTT spacer sequence TTCN PAM
ugauucuuuuuuuuuuuuuu

SEQ ID NO: 36028 - RNA, 20 nt, Artificial Sequence
  HTT spacer sequence TTCN PAM
uuuuuuuuuuuuuuugagau

SEQ ID NO: 36029 - RNA, 20 nt, Artificial Sequence
  HTT spacer sequence TTCN PAM
cucuuguugcccagguaaca

SEQ ID NO: 36030 - RNA, 20 nt, Artificial Sequence
  HTT spacer sequence TTCN PAM
agcgauucuccugccucagc

SEQ ID NO: 36031 - RNA, 20 nt, Artificial Sequence
  HTT spacer sequence TTCN PAM
ccugccucagccucucaagu

SEQ ID NO: 36032 - RNA, 20 nt, Artificial Sequence
  HTT spacer sequence TTCN PAM
cuauauuggucaggcugguc

SEQ ID NO: 36033 - RNA, 20 nt, Artificial Sequence
  HTT spacer sequence TTCN PAM
agaccagccugaccaauaua

SEQ ID NO: 36034 - RNA, 20 nt, Artificial Sequence
  HTT spacer sequence TTCN PAM
ugauucuugaaaaggacauu

SEQ ID NO: 36035 - RNA, 20 nt, Artificial Sequence
  HTT spacer sequence TTCN PAM
ugaaaaggacauugggugcu

SEQ ID NO: 36036 - RNA, 20 nt, Artificial Sequence
  HTT spacer sequence TTCN PAM
agaaucaagaaggggcuggg

SEQ ID NO: 36037 - RNA, 20 nt, Artificial Sequence
  HTT spacer sequence TTCN PAM
cacaagcauuuuuaucaaca

SEQ ID NO: 36038 - RNA, 20 nt, Artificial Sequence
  HTT spacer sequence TTCN PAM
aggacugauuugugguaaau

SEQ ID NO: 36039 - RNA, 20 nt, Artificial Sequence
  HTT spacer sequence TTCN PAM
cugaacauauucaggggcuc

SEQ ID NO: 36040 - RNA, 20 nt, Artificial Sequence
  HTT spacer sequence TTCN PAM
gugaacacaacuaugauaca

SEQ ID NO: 36041 - RNA, 20 nt, Artificial Sequence
  HTT spacer sequence TTCN PAM
ggggcucuacagaugcaggg

SEQ ID NO: 36042 - RNA, 20 nt, Artificial Sequence
  HTT spacer sequence TTCN PAM
gaauuccugcccugcgaaca

SEQ ID NO: 36043 - RNA, 20 nt, Artificial Sequence
  HTT spacer sequence TTCN PAM
gaagugugcaaagcagcuaa

SEQ ID NO: 36044 - RNA, 20 nt, Artificial Sequence
  HTT spacer sequence TTCN PAM
ugcccugcgaacaggacugg

SEQ ID NO: 36045 - RNA, 20 nt, Artificial Sequence
  HTT spacer sequence TTCN PAM
cagggcaggaauucagaagu

SEQ ID NO: 36046 - RNA, 20 nt, Artificial Sequence
  HTT spacer sequence TTCN PAM
auaaacuguuaucaaguacc

SEQ ID NO: 36047 - RNA, 20 nt, Artificial Sequence
  HTT spacer sequence TTCN PAM
cucauuaauucaauaaacug

SEQ ID NO: 36048 - RNA, 20 nt, Artificial Sequence
  HTT spacer sequence TTCN PAM
uucacucauuaauucaauaa

SEQ ID NO: 36049 - RNA, 20 nt, Artificial Sequence
  HTT spacer sequence TTCN PAM
ugcauuuauguaucuguuca

SEQ ID NO: 36050 - RNA, 20 nt, Artificial Sequence
  HTT spacer sequence TTCN PAM
uucaugcauuuauguaucug

SEQ ID NO: 36051 - RNA, 20 nt, Artificial Sequence
  HTT spacer sequence TTCN PAM
agacuuuuuacugacuguuc

SEQ ID NO: 36052 - RNA, 20 nt, Artificial Sequence
  HTT spacer sequence TTCN PAM
aaauaagaaauugaaaacuu

SEQ ID NO: 36053 - RNA, 20 nt, Artificial Sequence
  HTT spacer sequence TTCN PAM
uauuuugaacagucaguaaa

SEQ ID NO: 36054 - RNA, 20 nt, Artificial Sequence
  HTT spacer sequence TTCN PAM
auuucuuauuuugaacaguc

SEQ ID NO: 36055 - RNA, 20 nt, Artificial Sequence
  HTT spacer sequence TTCN PAM
ucugauuuuccucuacuauu

SEQ ID NO: 36056 - RNA, 20 nt, Artificial Sequence
  HTT spacer sequence TTCN PAM
ucuacuauuuacacaauuua

SEQ ID NO: 36057 - RNA, 20 nt, Artificial Sequence
  HTT spacer sequence TTCN PAM
auuuaaauuguguaaauagu

SEQ ID NO: 36058 - RNA, 20 nt, Artificial Sequence
  HTT spacer sequence TTCN PAM
auuucugucuaggauucgua

SEQ ID NO: 36059 - RNA, 20 nt, Artificial Sequence
  HTT spacer sequence TTCN PAM
gucuaggauucguacaauaa

SEQ ID NO: 36060 - RNA, 20 nt, Artificial Sequence
  HTT spacer sequence TTCN PAM
uacaauaacgggucaucucu

SEQ ID NO: 36061 - RNA, 20 nt, Artificial Sequence
  HTT spacer sequence TTCN PAM
acaguguguugaagagaucc

SEQ ID NO: 36062 - RNA, 20 nt, Artificial Sequence
  HTT spacer sequence TTCN PAM
acacacuguagaaagacaag

SEQ ID NO: 36063 - RNA, 20 nt, Artificial Sequence
  HTT spacer sequence TTCN PAM
gguauccuaggaucucuuca

SEQ ID NO: 36064 - RNA, 20 nt, Artificial Sequence
  HTT spacer sequence TTCN PAM
cgacuaaagcaggauuucag

SEQ ID NO: 36065 - RNA, 20 nt, Artificial Sequence
  HTT spacer sequence TTCN PAM
acaaguaagagcuucauucu

SEQ ID NO: 36066 - RNA, 20 nt, Artificial Sequence
  HTT spacer sequence TTCN PAM
uucuuuuccucuucuguuaa

SEQ ID NO: 36067 - RNA, 20 nt, Artificial Sequence
  HTT spacer sequence TTCN PAM
uuuccucuucuguuaagacg

SEQ ID NO: 36068 - RNA, 20 nt, Artificial Sequence
  HTT spacer sequence TTCN PAM
ucuucuguuaagacguucgg

SEQ ID NO: 36069 - RNA, 20 nt, Artificial Sequence
  HTT spacer sequence TTCN PAM
guuaagacguucggguauga

SEQ ID NO: 36070 - RNA, 20 nt, Artificial Sequence
  HTT spacer sequence TTCN PAM
gguaugacagcaaaacgcug

SEQ ID NO: 36071 - RNA, 20 nt, Artificial Sequence
  HTT spacer sequence TTCN PAM
cuucacuccccaggaggacg

SEQ ID NO: 36072 - RNA, 20 nt, Artificial Sequence
  HTT spacer sequence TTCN PAM
cuccccaggaggacgagguc

SEQ ID NO: 36073 - RNA, 20 nt, Artificial Sequence
  HTT spacer sequence TTCN PAM
gguguccucugcccuccaca

SEQ ID NO: 36074 - RNA, 20 nt, Artificial Sequence
  HTT spacer sequence TTCN PAM
agucccucggaguuucuguu

SEQ ID NO: 36075 - RNA, 20 nt, Artificial Sequence
  HTT spacer sequence TTCN PAM
guuuagaaugcucaaucuca

SEQ ID NO: 36076 - RNA, 20 nt, Artificial Sequence
  HTT spacer sequence TTCN PAM
aaacagaaacuccgagggac

SEQ ID NO: 36077 - RNA, 20 nt, Artificial Sequence
  HTT spacer sequence TTCN PAM
aaaugagauugagcauucua

SEQ ID NO: 36078 - RNA, 20 nt, Artificial Sequence
  HTT spacer sequence TTCN PAM
uugcaauucuaaaugagauu

SEQ ID NO: 36079 - RNA, 20 nt, Artificial Sequence
  HTT spacer sequence TTCN PAM
uacaauaucucaugagguau

SEQ ID NO: 36080 - RNA, 20 nt, Artificial Sequence
  HTT spacer sequence TTCN PAM
caggaagaauuucacgcugu

SEQ ID NO: 36081 - RNA, 20 nt, Artificial Sequence
  HTT spacer sequence TTCN PAM
ugugaaucacuauuaauacc

SEQ ID NO: 36082 - RNA, 20 nt, Artificial Sequence
  HTT spacer sequence TTCN PAM
uccugugaaucacuauuaau

SEQ ID NO: 36083 - RNA, 20 nt, Artificial Sequence
  HTT spacer sequence TTCN PAM
cgcugugagucuuugcuaac

SEQ ID NO: 36084 - RNA, 20 nt, Artificial Sequence
  HTT spacer sequence TTCN PAM
uaaaaguguuguucacgcca

SEQ ID NO: 36085 - RNA, 20 nt, Artificial Sequence
  HTT spacer sequence TTCN PAM
cgccacauuguugaugccuc

SEQ ID NO: 36086 - RNA, 20 nt, Artificial Sequence
  HTT spacer sequence TTCN PAM
cuguaguuguugaagacucu

SEQ ID NO: 36087 - RNA, 20 nt, Artificial Sequence
  HTT spacer sequence TTCN PAM
acaacuacagugaaaaaaau

SEQ ID NO: 36088 - RNA, 20 nt, Artificial Sequence
  HTT spacer sequence TTCN PAM
aaccccagcaagucacaagg

SEQ ID NO: 36089 - RNA, 20 nt, Artificial Sequence
  HTT spacer sequence TTCN PAM
uggccccguacacccacuuc

SEQ ID NO: 36090 - RNA, 20 nt, Artificial Sequence
  HTT spacer sequence TTCN PAM
cccaggcccucgcugacgcc

SEQ ID NO: 36091 - RNA, 20 nt, Artificial Sequence
  HTT spacer sequence TTCN PAM
ucaggcuggcgucagcgagg

SEQ ID NO: 36092 - RNA, 20 nt, Artificial Sequence
  HTT spacer sequence TTCN PAM
ccugcuccgccugcaccaug

SEQ ID NO: 36093 - RNA, 20 nt, Artificial Sequence
  HTT spacer sequence TTCN PAM
ugccacaacuguuaccccga

SEQ ID NO: 36094 - RNA, 20 nt, Artificial Sequence
  HTT spacer sequence TTCN PAM
accaacgacagcauucuugc

SEQ ID NO: 36095 - RNA, 20 nt, Artificial Sequence
  HTT spacer sequence TTCN PAM
ugcuuccaccaacgacagca

SEQ ID NO: 36096 - RNA, 20 nt, Artificial Sequence
  HTT spacer sequence TTCN PAM
ugcuugcucuuucgugcuuc

SEQ ID NO: 36097 - RNA, 20 nt, Artificial Sequence
  HTT spacer sequence TTCN PAM
uuuacaaaguauuuccugcu

SEQ ID NO: 36098 - RNA, 20 nt, Artificial Sequence
  HTT spacer sequence TTCN PAM
uuuuuauucuuuuacaaagu

SEQ ID NO: 36099 - RNA, 20 nt, Artificial Sequence
  HTT spacer sequence TTCN PAM
cuaacauuuuucguuuuuau

SEQ ID NO: 36100 - RNA, 20 nt, Artificial Sequence
  HTT spacer sequence TTCN PAM
aauagucugcuguauucaga

SEQ ID NO: 36101 - RNA, 20 nt, Artificial Sequence
  HTT spacer sequence TTCN PAM
gagaacucuaggagauauau

SEQ ID NO: 36102 - RNA, 20 nt, Artificial Sequence
  HTT spacer sequence TTCN PAM
cugaauacagcagacuauua

SEQ ID NO: 36103 - RNA, 20 nt, Artificial Sequence
  HTT spacer sequence TTCN PAM
aagaaguguguggccaguga

SEQ ID NO: 36104 - RNA, 20 nt, Artificial Sequence
  HTT spacer sequence TTCN PAM
uggaaggccgggcuaugccu

SEQ ID NO: 36105 - RNA, 20 nt, Artificial Sequence
  HTT spacer sequence TTCN PAM
uccuccucuacccccaccuc

SEQ ID NO: 36106 - RNA, 20 nt, Artificial Sequence
  HTT spacer sequence TTCN PAM
cagcccacucaguguuccuc

SEQ ID NO: 36107 - RNA, 20 nt, Artificial Sequence
  HTT spacer sequence TTCN PAM
gguuugcugacacacuuugg

SEQ ID NO: 36108 - RNA, 20 nt, Artificial Sequence
  HTT spacer sequence TTCN PAM
uaauguccccacccauucaa

SEQ ID NO: 36109 - RNA, 20 nt, Artificial Sequence
  HTT spacer sequence TTCN PAM
aagcacaggaccuguagagu

SEQ ID NO: 36110 - RNA, 20 nt, Artificial Sequence
  HTT spacer sequence TTCN PAM
ggccuguaacaaggaugaaa

SEQ ID NO: 36111 - RNA, 20 nt, Artificial Sequence
  HTT spacer sequence TTCN PAM
uccuuguuacaggccugaaa

SEQ ID NO: 36112 - RNA, 20 nt, Artificial Sequence
  HTT spacer sequence TTCN PAM
uucauccuuguuacaggccu

SEQ ID NO: 36113 - RNA, 20 nt, Artificial Sequence
  HTT spacer sequence TTCN PAM
uagcagcacaguagugcugg

SEQ ID NO: 36114 - RNA, 20 nt, Artificial Sequence
  HTT spacer sequence TTCN PAM
gaggugugugaaggccauag

SEQ ID NO: 36115 - RNA, 20 nt, Artificial Sequence
  HTT spacer sequence TTCN PAM
cacaccucugaacaccagca

SEQ ID NO: 36116 - RNA, 20 nt, Artificial Sequence
  HTT spacer sequence TTCN PAM
auggccuucacacaccucug

SEQ ID NO: 36117 - RNA, 20 nt, Artificial Sequence
  HTT spacer sequence TTCN PAM
agucauaaagcugacaaaac

SEQ ID NO: 36118 - RNA, 20 nt, Artificial Sequence
  HTT spacer sequence TTCN PAM
cuuaaauuuguuuuuuuuuu

SEQ ID NO: 36119 - RNA, 20 nt, Artificial Sequence
  HTT spacer sequence TTCN PAM
ugccauucuccugccucagc

SEQ ID NO: 36120 - RNA, 20 nt, Artificial Sequence
  HTT spacer sequence TTCN PAM
ccugccucagccucccgagu

SEQ ID NO: 36121 - RNA, 20 nt, Artificial Sequence
  HTT spacer sequence TTCN PAM
ccauguuagccaggaugguc

SEQ ID NO: 36122 - RNA, 20 nt, Artificial Sequence
  HTT spacer sequence TTCN PAM
cuuaaauuuauguuuguguu

SEQ ID NO: 36123 - RNA, 20 nt, Artificial Sequence
  HTT spacer sequence TTCN PAM
uaaauugccuuaaguaugaa

SEQ ID NO: 36124 - RNA, 20 nt, Artificial Sequence
  HTT spacer sequence TTCN PAM
uacuuaaggcaauuuaagaa

SEQ ID NO: 36125 - RNA, 20 nt, Artificial Sequence
  HTT spacer sequence TTCN PAM
auuauugcuacuauacagau

SEQ ID NO: 36126 - RNA, 20 nt, Artificial Sequence
  HTT spacer sequence TTCN PAM
uuuuauaaauuuagcgauua

SEQ ID NO: 36127 - RNA, 20 nt, Artificial Sequence
  HTT spacer sequence TTCN PAM
uugacuccugacucuagugu

SEQ ID NO: 36128 - RNA, 20 nt, Artificial Sequence
  HTT spacer sequence TTCN PAM
aggcuguauguuagugaugu

SEQ ID NO: 36129 - RNA, 20 nt, Artificial Sequence
  HTT spacer sequence TTCN PAM
ggaguaagucuguuucaaug

SEQ ID NO: 36130 - RNA, 20 nt, Artificial Sequence
  HTT spacer sequence TTCN PAM
augcuuucuguaaccauuug

SEQ ID NO: 36131 - RNA, 20 nt, Artificial Sequence
  HTT spacer sequence TTCN PAM
guaaccauuugggguauuaa

SEQ ID NO: 36132 - RNA, 20 nt, Artificial Sequence
  HTT spacer sequence TTCN PAM
uauauguuucuuagaaggga

SEQ ID NO: 36133 - RNA, 20 nt, Artificial Sequence
  HTT spacer sequence TTCN PAM
uagaagggauaucauugaug

SEQ ID NO: 36134 - RNA, 20 nt, Artificial Sequence
  HTT spacer sequence TTCN PAM
aagaaacauauaugaaauua

SEQ ID NO: 36135 - RNA, 20 nt, Artificial Sequence
  HTT spacer sequence TTCN PAM
ucuaaauuacugaucuuuua

SEQ ID NO: 36136 - RNA, 20 nt, Artificial Sequence
  HTT spacer sequence TTCN PAM
aaauuacugaucuuuuaaau

SEQ ID NO: 36137 - RNA, 20 nt, Artificial Sequence
  HTT spacer sequence TTCN PAM
ccuuucucucaaaucucacu

SEQ ID NO: 36138 - RNA, 20 nt, Artificial Sequence
  HTT spacer sequence TTCN PAM
cucaaaucucacuuaagacu

SEQ ID NO: 36139 - RNA, 20 nt, Artificial Sequence
  HTT spacer sequence TTCN PAM
uguagcagaaaaaagcucag

SEQ ID NO: 36140 - RNA, 20 nt, Artificial Sequence
  HTT spacer sequence TTCN PAM
gcuacaggaaacugacuacu

SEQ ID NO: 36141 - RNA, 20 nt, Artificial Sequence
  HTT spacer sequence TTCN PAM
gcgagugaggagacuugaug

SEQ ID NO: 36142 - RNA, 20 nt, Artificial Sequence
  HTT spacer sequence TTCN PAM
gauaaugacacucuauuuag

SEQ ID NO: 36143 - RNA, 20 nt, Artificial Sequence
  HTT spacer sequence TTCN PAM
aguuguuucucaaucugaca

SEQ ID NO: 36144 - RNA, 20 nt, Artificial Sequence
  HTT spacer sequence TTCN PAM
caaucugacacguucugauc

SEQ ID NO: 36145 - RNA, 20 nt, Artificial Sequence
  HTT spacer sequence TTCN PAM
gaucgugugaaugugaaauu

SEQ ID NO: 36146 - RNA, 20 nt, Artificial Sequence
  HTT spacer sequence TTCN PAM
cacgaucagaacgugucaga

SEQ ID NO: 36147 - RNA, 20 nt, Artificial Sequence
  HTT spacer sequence TTCN PAM
cauucacacgaucagaacgu

SEQ ID NO: 36148 - RNA, 20 nt, Artificial Sequence
  HTT spacer sequence TTCN PAM
cauucucugcuucccuuuua

SEQ ID NO: 36149 - RNA, 20 nt, Artificial Sequence
  HTT spacer sequence TTCN PAM
cugcuucccuuuuauuccca

SEQ ID NO: 36150 - RNA, 20 nt, Artificial Sequence
  HTT spacer sequence TTCN PAM
cuuuuauucccauuuggcag

SEQ ID NO: 36151 - RNA, 20 nt, Artificial Sequence
  HTT spacer sequence TTCN PAM
cauuuggcagaugguuugau

SEQ ID NO: 36152 - RNA, 20 nt, Artificial Sequence
  HTT spacer sequence TTCN PAM
ggaggacaucaaaccaucug

SEQ ID NO: 36153 - RNA, 20 nt, Artificial Sequence
  HTT spacer sequence TTCN PAM
acuggguagacacuuucugg

SEQ ID NO: 36154 - RNA, 20 nt, Artificial Sequence
  HTT spacer sequence TTCN PAM
uugugacacucgugagguuu

SEQ ID NO: 36155 - RNA, 20 nt, Artificial Sequence
  HTT spacer sequence TTCN PAM
caugccacaaacggcaccau

SEQ ID NO: 36156 - RNA, 20 nt, Artificial Sequence
  HTT spacer sequence TTCN PAM
ucucuagcacugacacgccu

SEQ ID NO: 36157 - RNA, 20 nt, Artificial Sequence
  HTT spacer sequence TTCN PAM
agguauuuugcuugaagcuu

SEQ ID NO: 36158 - RNA, 20 nt, Artificial Sequence
  HTT spacer sequence TTCN PAM
agcaaaauaccuggaaaguc

SEQ ID NO: 36159 - RNA, 20 nt, Artificial Sequence
  HTT spacer sequence TTCN PAM
acuaaaagcuucaagcaaaa

SEQ ID NO: 36160 - RNA, 20 nt, Artificial Sequence
  HTT spacer sequence TTCN PAM
uucuuucuuuuuuucuuuuu

SEQ ID NO: 36161 - RNA, 20 nt, Artificial Sequence
  HTT spacer sequence TTCN PAM
uucuuuuuuucuuuuuuaua

SEQ ID NO: 36162 - RNA, 20 nt, Artificial Sequence
  HTT spacer sequence TTCN PAM
uuuuuucuuuuuuauagaau

SEQ ID NO: 36163 - RNA, 20 nt, Artificial Sequence
  HTT spacer sequence TTCN PAM
uuuuuauagaaugcuauuca

SEQ ID NO: 36164 - RNA, 20 nt, Artificial Sequence
  HTT spacer sequence TTCN PAM
auaaaaaagaaaaaaagaaa

SEQ ID NO: 36165 - RNA, 20 nt, Artificial Sequence
  HTT spacer sequence TTCN PAM
uaaucacauucguuuguuug

SEQ ID NO: 36166 - RNA, 20 nt, Artificial Sequence
  HTT spacer sequence TTCN PAM
uuuguuugaaccucuuguua

SEQ ID NO: 36167 - RNA, 20 nt, Artificial Sequence
  HTT spacer sequence TTCN PAM
aacaaacgaaugugauuaug

SEQ ID NO: 36168 - RNA, 20 nt, Artificial Sequence
  HTT spacer sequence TTCN PAM
guaacugcacacauguugua

SEQ ID NO: 36169 - RNA, 20 nt, Artificial Sequence
  HTT spacer sequence TTCN PAM
guuacggguuaauuacuguc

SEQ ID NO: 36170 - RNA, 20 nt, Artificial Sequence
  HTT spacer sequence TTCN PAM
ggauucagaucagguuuguc

SEQ ID NO: 36171 - RNA, 20 nt, Artificial Sequence
  HTT spacer sequence TTCN PAM
gaucagguuugucacuuuua

SEQ ID NO: 36172 - RNA, 20 nt, Artificial Sequence
  HTT spacer sequence TTCN PAM
uccaucauaccuguuccuaa

SEQ ID NO: 36173 - RNA, 20 nt, Artificial Sequence
  HTT spacer sequence TTCN PAM
uaauuuaguacaaauuaccc

SEQ ID NO: 36174 - RNA, 20 nt, Artificial Sequence
  HTT spacer sequence TTCN PAM
gugucuuuuaggguaauuug

SEQ ID NO: 36175 - RNA, 20 nt, Artificial Sequence
  HTT spacer sequence TTCN PAM
uuaaaguagauuucaguguc

SEQ ID NO: 36176 - RNA, 20 nt, Artificial Sequence
  HTT spacer sequence TTCN PAM
cucaucaguugcugcugcuu

SEQ ID NO: 36177 - RNA, 20 nt, Artificial Sequence
  HTT spacer sequence TTCN PAM
ugcaccuagcuggugcagaa

SEQ ID NO: 36178 - RNA, 20 nt, Artificial Sequence
  HTT spacer sequence TTCN PAM
gcaccagcuaggugcaugaa

SEQ ID NO: 36179 - RNA, 20 nt, Artificial Sequence
  HTT spacer sequence TTCN PAM
aaagguuugucccauccacu

SEQ ID NO: 36180 - RNA, 20 nt, Artificial Sequence
  HTT spacer sequence TTCN PAM
aacuuauuuuggaggggagg

SEQ ID NO: 36181 - RNA, 20 nt, Artificial Sequence
  HTT spacer sequence TTCN PAM
ccaaacaauaaaucuuaauu

SEQ ID NO: 36182 - RNA, 20 nt, Artificial Sequence
  HTT spacer sequence TTCN PAM
agcuaucuaacagguucacu

SEQ ID NO: 36183 - RNA, 20 nt, Artificial Sequence
  HTT spacer sequence TTCN PAM
cuuaccucuuuaaaaaggaa

SEQ ID NO: 36184 - RNA, 20 nt, Artificial Sequence
  HTT spacer sequence TTCN PAM
uuuuuaaagagguaagugaa

SEQ ID NO: 36185 - RNA, 20 nt, Artificial Sequence
  HTT spacer sequence TTCN PAM
auuccuuuuuaaagagguaa

SEQ ID NO: 36186 - RNA, 20 nt, Artificial Sequence
  HTT spacer sequence TTCN PAM
ccucuugacugcauuaccuu

SEQ ID NO: 36187 - RNA, 20 nt, Artificial Sequence
  HTT spacer sequence TTCN PAM
uccuauaguugcugugggca

SEQ ID NO: 36188 - RNA, 20 nt, Artificial Sequence
  HTT spacer sequence TTCN PAM
ggcuaguccugucccuucau

SEQ ID NO: 36189 - RNA, 20 nt, Artificial Sequence
  HTT spacer sequence TTCN PAM
ugaugcacauuuuccucaag

SEQ ID NO: 36190 - RNA, 20 nt, Artificial Sequence
  HTT spacer sequence TTCN PAM
ucaagauucgucccaguuaa

SEQ ID NO: 36191 - RNA, 20 nt, Artificial Sequence
  HTT spacer sequence TTCN PAM
ucccaguuaaaucacugcag

SEQ ID NO: 36192 - RNA, 20 nt, Artificial Sequence
  HTT spacer sequence TTCN PAM
ucugcagugauuuaacuggg

SEQ ID NO: 36193 - RNA, 20 nt, Artificial Sequence
  HTT spacer sequence TTCN PAM
ucgucaaaauuuaacuguca

SEQ ID NO: 36194 - RNA, 20 nt, Artificial Sequence
  HTT spacer sequence TTCN PAM
uaugugggguaggaauauuu

SEQ ID NO: 36195 - RNA, 20 nt, Artificial Sequence
  HTT spacer sequence TTCN PAM
uaccccacauaagaaaguag

SEQ ID NO: 36196 - RNA, 20 nt, Artificial Sequence
  HTT spacer sequence TTCN PAM
aacucacaaauauuccuacc

SEQ ID NO: 36197 - RNA, 20 nt, Artificial Sequence
  HTT spacer sequence TTCN PAM
cuauuuccuucuagacguaa

SEQ ID NO: 36198 - RNA, 20 nt, Artificial Sequence
  HTT spacer sequence TTCN PAM
uucuagacguaaaucuguua

SEQ ID NO: 36199 - RNA, 20 nt, Artificial Sequence
  HTT spacer sequence TTCN PAM
agacguaaaucuguuaaucc

SEQ ID NO: 36200 - RNA, 20 nt, Artificial Sequence
  HTT spacer sequence TTCN PAM
ggugaguaacagugcugaca

SEQ ID NO: 36201 - RNA, 20 nt, Artificial Sequence
  HTT spacer sequence TTCN PAM
cuaggagaacugagggcacu

SEQ ID NO: 36202 - RNA, 20 nt, Artificial Sequence
  HTT spacer sequence TTCN PAM
ccuagggaaacagacccuuu

SEQ ID NO: 36203 - RNA, 20 nt, Artificial Sequence
  HTT spacer sequence TTCN PAM
acaguggguauugggguggu

SEQ ID NO: 36204 - RNA, 20 nt, Artificial Sequence
  HTT spacer sequence TTCN PAM
cgccauucuccugccucagc

SEQ ID NO: 36205 - RNA, 20 nt, Artificial Sequence
  HTT spacer sequence TTCN PAM
ccugccucagccucccgagu

SEQ ID NO: 36206 - RNA, 20 nt, Artificial Sequence
  HTT spacer sequence TTCN PAM
cuguguuagccaggaugguc

SEQ ID NO: 36207 - RNA, 20 nt, Artificial Sequence
  HTT spacer sequence TTCN PAM
uuaaaagcagaccccaggcc

SEQ ID NO: 36208 - RNA, 20 nt, Artificial Sequence
  HTT spacer sequence TTCN PAM
ucuuucuuucacaaaaccug

SEQ ID NO: 36209 - RNA, 20 nt, Artificial Sequence
  HTT spacer sequence TTCN PAM
uucacaaaaccuguccgaag

SEQ ID NO: 36210 - RNA, 20 nt, Artificial Sequence
  HTT spacer sequence TTCN PAM
caaaaccuguccgaagaaaa

SEQ ID NO: 36211 - RNA, 20 nt, Artificial Sequence
  HTT spacer sequence TTCN PAM
gacagguuuugugaaagaaa

SEQ ID NO: 36212 - RNA, 20 nt, Artificial Sequence
  HTT spacer sequence TTCN PAM
ucggacagguuuugugaaag

SEQ ID NO: 36213 - RNA, 20 nt, Artificial Sequence
  HTT spacer sequence TTCN PAM
ugaggagagcaauggcccau

SEQ ID NO: 36214 - RNA, 20 nt, Artificial Sequence
  HTT spacer sequence TTCN PAM
caaugacuauuuccugagga

SEQ ID NO: 36215 - RNA, 20 nt, Artificial Sequence
  HTT spacer sequence TTCN PAM
uuuccuuuccuuugacacua

SEQ ID NO: 36216 - RNA, 20 nt, Artificial Sequence
  HTT spacer sequence TTCN PAM
uuuccuuugacacuaggagg

SEQ ID NO: 36217 - RNA, 20 nt, Artificial Sequence
  HTT spacer sequence TTCN PAM
uuugacacuaggaggcugac

SEQ ID NO: 36218 - RNA, 20 nt, Artificial Sequence
  HTT spacer sequence TTCN PAM
ccccagucagccuccuagug

SEQ ID NO: 36219 - RNA, 20 nt, Artificial Sequence
  HTT spacer sequence TTCN PAM
cuugggguacccgugccccc

SEQ ID NO: 36220 - RNA, 20 nt, Artificial Sequence
  HTT spacer sequence TTCN PAM
auucuaguaagaacaaagac

SEQ ID NO: 36221 - RNA, 20 nt, Artificial Sequence
  HTT spacer sequence TTCN PAM
aguaagaacaaagacugcuc

SEQ ID NO: 36222 - RNA, 20 nt, Artificial Sequence
  HTT spacer sequence TTCN PAM
uacuagaauggaacaaauca

SEQ ID NO: 36223 - RNA, 20 nt, Artificial Sequence
  HTT spacer sequence TTCN PAM
uguuuguucugauugccuuu

SEQ ID NO: 36224 - RNA, 20 nt, Artificial Sequence
  HTT spacer sequence TTCN PAM
gauugccuuucaucaaccgg

SEQ ID NO: 36225 - RNA, 20 nt, Artificial Sequence
  HTT spacer sequence TTCN PAM
ucaaccgguccccuuucucc

SEQ ID NO: 36226 - RNA, 20 nt, Artificial Sequence
  HTT spacer sequence TTCN PAM
cccaguucuuaagauucagu

SEQ ID NO: 36227 - RNA, 20 nt, Artificial Sequence
  HTT spacer sequence TTCN PAM
uaagauucaguacagugaca

SEQ ID NO: 36228 - RNA, 20 nt, Artificial Sequence
  HTT spacer sequence TTCN PAM
guacagugacaguuuuauga

SEQ ID NO: 36229 - RNA, 20 nt, Artificial Sequence
  HTT spacer sequence TTCN PAM
uaaaacugucacuguacuga

SEQ ID NO: 36230 - RNA, 20 nt, Artificial Sequence
  HTT spacer sequence TTCN PAM
uguucauaaaacugucacug

SEQ ID NO: 36231 - RNA, 20 nt, Artificial Sequence
  HTT spacer sequence TTCN PAM
auucuuguucauaaaacugu

SEQ ID NO: 36232 - RNA, 20 nt, Artificial Sequence
  HTT spacer sequence TTCN PAM
aguguucuauucuuguucau

SEQ ID NO: 36233 - RNA, 20 nt, Artificial Sequence
  HTT spacer sequence TTCN PAM
augguuugucuguucuagug

SEQ ID NO: 36234 - RNA, 20 nt, Artificial Sequence
  HTT spacer sequence TTCN PAM
gcccagaggcucugagaaaa

SEQ ID NO: 36235 - RNA, 20 nt, Artificial Sequence
  HTT spacer sequence TTCN PAM
cagagccucugggcagaaug

SEQ ID NO: 36236 - RNA, 20 nt, Artificial Sequence
  HTT spacer sequence TTCN PAM
auggauaaagcauggagcau

SEQ ID NO: 36237 - RNA, 20 nt, Artificial Sequence
  HTT spacer sequence TTCN PAM
caaccugacggggagcuucc

SEQ ID NO: 36238 - RNA, 20 nt, Artificial Sequence
  HTT spacer sequence TTCN PAM
cugcagcugucagcuuuccc

SEQ ID NO: 36239 - RNA, 20 nt, Artificial Sequence
  HTT spacer sequence TTCN PAM
ucccccaaccaucugagagg

SEQ ID NO: 36240 - RNA, 20 nt, Artificial Sequence
  HTT spacer sequence TTCN PAM
gggaaucugugccacccuau

SEQ ID NO: 36241 - RNA, 20 nt, Artificial Sequence
  HTT spacer sequence TTCN PAM
cugaaacugguuuaguaaua

SEQ ID NO: 36242 - RNA, 20 nt, Artificial Sequence
  HTT spacer sequence TTCN PAM
cguuaauggcagauagggug

SEQ ID NO: 36243 - RNA, 20 nt, Artificial Sequence
  HTT spacer sequence TTCN PAM
aagagacaucagacaauacc

SEQ ID NO: 36244 - RNA, 20 nt, Artificial Sequence
  HTT spacer sequence TTCN PAM
aaugagauuucaccucaggg

SEQ ID NO: 36245 - RNA, 20 nt, Artificial Sequence
  HTT spacer sequence TTCN PAM
ccucaggguauaguaaaguu

SEQ ID NO: 36246 - RNA, 20 nt, Artificial Sequence
  HTT spacer sequence TTCN PAM
uggauguguucugcaauuau

SEQ ID NO: 36247 - RNA, 20 nt, Artificial Sequence
  HTT spacer sequence TTCN PAM
gcaauuaucuaggcugauuu

SEQ ID NO: 36248 - RNA, 20 nt, Artificial Sequence
  HTT spacer sequence TTCN PAM
gaauagaguuaugcuuauag

SEQ ID NO: 36249 - RNA, 20 nt, Artificial Sequence
  HTT spacer sequence TTCN PAM
gaaaucagccuagauaauug

SEQ ID NO: 36250 - RNA, 20 nt, Artificial Sequence
  HTT spacer sequence TTCN PAM
ugacagcugauaaauuugac

SEQ ID NO: 36251 - RNA, 20 nt, Artificial Sequence
  HTT spacer sequence TTCN PAM
uccugcuuaucugcauaaau

SEQ ID NO: 36252 - RNA, 20 nt, Artificial Sequence
  HTT spacer sequence TTCN PAM
uuuccuccugcuuaucugca

SEQ ID NO: 36253 - RNA, 20 nt, Artificial Sequence
  HTT spacer sequence TTCN PAM
caucaauaauaggauuaaaa

SEQ ID NO: 36254 - RNA, 20 nt, Artificial Sequence
  HTT spacer sequence TTCN PAM
uuccuguagguguuuauugg

SEQ ID NO: 36255 - RNA, 20 nt, Artificial Sequence
  HTT spacer sequence TTCN PAM
uguagguguuuauuggcuuu

SEQ ID NO: 36256 - RNA, 20 nt, Artificial Sequence
  HTT spacer sequence TTCN PAM
auacaaagccaauaaacacc

SEQ ID NO: 36257 - RNA, 20 nt, Artificial Sequence
  HTT spacer sequence TTCN PAM
aacuguuucaauacaaagcc

SEQ ID NO: 36258 - RNA, 20 nt, Artificial Sequence
  HTT spacer sequence TTCN PAM
auguauucaaacuguuucaa

SEQ ID NO: 36259 - RNA, 20 nt, Artificial Sequence
  HTT spacer sequence TTCN PAM
gguaauagcauuuuauuauu

SEQ ID NO: 36260 - RNA, 20 nt, Artificial Sequence
  HTT spacer sequence TTCN PAM
ucuucuuguguacuuacaug

SEQ ID NO: 36261 - RNA, 20 nt, Artificial Sequence
  HTT spacer sequence TTCN PAM
ucuuguguacuuacauguaa

SEQ ID NO: 36262 - RNA, 20 nt, Artificial Sequence
  HTT spacer sequence TTCN PAM
uguguacuuacauguaauuu

SEQ ID NO: 36263 - RNA, 20 nt, Artificial Sequence
  HTT spacer sequence TTCN PAM
cuuaauaaccuaaauuacau

SEQ ID NO: 36264 - RNA, 20 nt, Artificial Sequence
  HTT spacer sequence TTCN PAM
uuaaauggaaaucugacuaa

SEQ ID NO: 36265 - RNA, 20 nt, Artificial Sequence
  HTT spacer sequence TTCN PAM
auuuaaagaaaacagcaaaa

SEQ ID NO: 36266 - RNA, 20 nt, Artificial Sequence
  HTT spacer sequence TTCN PAM
cuuaaaaauuaauguauauc

SEQ ID NO: 36267 - RNA, 20 nt, Artificial Sequence
  HTT spacer sequence TTCN PAM
aaacaagucuugagauauac

SEQ ID NO: 36268 - RNA, 20 nt, Artificial Sequence
  HTT spacer sequence TTCN PAM
gauacauaacuacuuccaaa

SEQ ID NO: 36269 - RNA, 20 nt, Artificial Sequence
  HTT spacer sequence TTCN PAM
auauguugucaguauucauu

SEQ ID NO: 36270 - RNA, 20 nt, Artificial Sequence
  HTT spacer sequence TTCN PAM
uugcacauuucaaagcauuu

SEQ ID NO: 36271 - RNA, 20 nt, Artificial Sequence
  HTT spacer sequence TTCN PAM
aagcauuuaauuguguugac

SEQ ID NO: 36272 - RNA, 20 nt, Artificial Sequence
  HTT spacer sequence TTCN PAM
accaucugucaacacaauua

SEQ ID NO: 36273 - RNA, 20 nt, Artificial Sequence
  HTT spacer sequence TTCN PAM
uuccaccaucugucaacaca

SEQ ID NO: 36274 - RNA, 20 nt, Artificial Sequence
  HTT spacer sequence TTCN PAM
uagagaaagcaguuuuauau

SEQ ID NO: 36275 - RNA, 20 nt, Artificial Sequence
  HTT spacer sequence TTCN PAM
cuaagaagauuuaaaaacua

SEQ ID NO: 36276 - RNA, 20 nt, Artificial Sequence
  HTT spacer sequence TTCN PAM
cugcagcuuuuucuugcuag

SEQ ID NO: 36277 - RNA, 20 nt, Artificial Sequence
  HTT spacer sequence TTCN PAM
ugcuagauguugagguuuua

SEQ ID NO: 36278 - RNA, 20 nt, Artificial Sequence
  HTT spacer sequence TTCN PAM
ugcuaguccauuacagguuu

SEQ ID NO: 36279 - RNA, 20 nt, Artificial Sequence
  HTT spacer sequence TTCN PAM
uuuaguaccuaaaaugcuua

SEQ ID NO: 36280 - RNA, 20 nt, Artificial Sequence
  HTT spacer sequence TTCN PAM
uaauuacaauguuuauuaag

SEQ ID NO: 36281 - RNA, 20 nt, Artificial Sequence
  HTT spacer sequence TTCN PAM
gcacuaaauuuuccuaauua

SEQ ID NO: 36282 - RNA, 20 nt, Artificial Sequence
  HTT spacer sequence TTCN PAM
uucugcacuaaauuuuccua

SEQ ID NO: 36283 - RNA, 20 nt, Artificial Sequence
  HTT spacer sequence TTCN PAM
cagauucccuggggucugga

SEQ ID NO: 36284 - RNA, 20 nt, Artificial Sequence
  HTT spacer sequence TTCN PAM
cuggggucuggaaacauagu

SEQ ID NO: 36285 - RNA, 20 nt, Artificial Sequence
  HTT spacer sequence TTCN PAM
agaccccagggaaucuggga

SEQ ID NO: 36286 - RNA, 20 nt, Artificial Sequence
  HTT spacer sequence TTCN PAM
aauuacaugacaccuccacu

SEQ ID NO: 36287 - RNA, 20 nt, Artificial Sequence
  HTT spacer sequence TTCN PAM
cuuuugaguuucaauuucuu

SEQ ID NO: 36288 - RNA, 20 nt, Artificial Sequence
  HTT spacer sequence TTCN PAM
auuucuucaagagcaaagag

SEQ ID NO: 36289 - RNA, 20 nt, Artificial Sequence
  HTT spacer sequence TTCN PAM
ucaagagcaaagaggcagag

SEQ ID NO: 36290 - RNA, 20 nt, Artificial Sequence
  HTT spacer sequence TTCN PAM
agagcaaagaggcagaggag

SEQ ID NO: 36291 - RNA, 20 nt, Artificial Sequence
  HTT spacer sequence TTCN PAM
uagcucuccucugccucuuu

SEQ ID NO: 36292 - RNA, 20 nt, Artificial Sequence
  HTT spacer sequence TTCN PAM
accugcugccuccgaaccuu

SEQ ID NO: 36293 - RNA, 20 nt, Artificial Sequence
  HTT spacer sequence TTCN PAM
gaggcagcagguagaaggca

SEQ ID NO: 36294 - RNA, 20 nt, Artificial Sequence
  HTT spacer sequence TTCN PAM
accuugacagcaagcacaca

SEQ ID NO: 36295 - RNA, 20 nt, Artificial Sequence
  HTT spacer sequence TTCN PAM
ugauucaaccuugacagcaa

SEQ ID NO: 36296 - RNA, 20 nt, Artificial Sequence
  HTT spacer sequence TTCN PAM
uuuaaaauuaagauacauau

SEQ ID NO: 36297 - RNA, 20 nt, Artificial Sequence
  HTT spacer sequence TTCN PAM
cuaaaaacaaaaacauccau

SEQ ID NO: 36298 - RNA, 20 nt, Artificial Sequence
  HTT spacer sequence TTCN PAM
aaacaucuuuuucuucuugg

SEQ ID NO: 36299 - RNA, 20 nt, Artificial Sequence
  HTT spacer sequence TTCN PAM
ucuugguauuacuaucuuau

SEQ ID NO: 36300 - RNA, 20 nt, Artificial Sequence
  HTT spacer sequence TTCN PAM
ugguauuacuaucuuaugaa

SEQ ID NO: 36301 - RNA, 20 nt, Artificial Sequence
  HTT spacer sequence TTCN PAM
uaagauaguaauaccaagaa

SEQ ID NO: 36302 - RNA, 20 nt, Artificial Sequence
  HTT spacer sequence TTCN PAM
aaacagaucauuggaauucc

SEQ ID NO: 36303 - RNA, 20 nt, Artificial Sequence
  HTT spacer sequence TTCN PAM
aaugaucuguuuugaaugau

SEQ ID NO: 36304 - RNA, 20 nt, Artificial Sequence
  HTT spacer sequence TTCN PAM
uaaaaucauucagcucugug

SEQ ID NO: 36305 - RNA, 20 nt, Artificial Sequence
  HTT spacer sequence TTCN PAM
gcucugugauggcaucaugg

SEQ ID NO: 36306 - RNA, 20 nt, Artificial Sequence
  HTT spacer sequence TTCN PAM
acuggccaugaugccaucac

SEQ ID NO: 36307 - RNA, 20 nt, Artificial Sequence
  HTT spacer sequence TTCN PAM
uuccacuggccaugaugcca

SEQ ID NO: 36308 - RNA, 20 nt, Artificial Sequence
  HTT spacer sequence TTCN PAM
cugucgucuucggugucgug

SEQ ID NO: 36309 - RNA, 20 nt, Artificial Sequence
  HTT spacer sequence TTCN PAM
gugucgugaugugcuuggca

SEQ ID NO: 36310 - RNA, 20 nt, Artificial Sequence
  HTT spacer sequence TTCN PAM
uuuucauauacccacuuuga

SEQ ID NO: 36311 - RNA, 20 nt, Artificial Sequence
  HTT spacer sequence TTCN PAM
uauacccacuuugaacguug

SEQ ID NO: 36312 - RNA, 20 nt, Artificial Sequence
  HTT spacer sequence TTCN PAM
aaguggguauaugaaaacga

SEQ ID NO: 36313 - RNA, 20 nt, Artificial Sequence
  HTT spacer sequence TTCN PAM
caggcucugcaugugugucu

SEQ ID NO: 36314 - RNA, 20 nt, Artificial Sequence
  HTT spacer sequence TTCN PAM
cauacacagacacacaugca

SEQ ID NO: 36315 - RNA, 20 nt, Artificial Sequence
  HTT spacer sequence TTCN PAM
aaagagaagagagcauauuc

SEQ ID NO: 36316 - RNA, 20 nt, Artificial Sequence
  HTT spacer sequence TTCN PAM
cuuuugaaacgucucuaacc

SEQ ID NO: 36317 - RNA, 20 nt, Artificial Sequence
  HTT spacer sequence TTCN PAM
uuacucucagcaauuuguaa

SEQ ID NO: 36318 - RNA, 20 nt, Artificial Sequence
  HTT spacer sequence TTCN PAM
cagggaaaaaaauucaagaa

SEQ ID NO: 36319 - RNA, 20 nt, Artificial Sequence
  HTT spacer sequence TTCN PAM
cugagaagauuacaaauugc

SEQ ID NO: 36320 - RNA, 20 nt, Artificial Sequence
  HTT spacer sequence TTCN PAM
agaaacaguaagauaaccua

SEQ ID NO: 36321 - RNA, 20 nt, Artificial Sequence
  HTT spacer sequence TTCN PAM
ugaauuuuuuucccugagaa

SEQ ID NO: 36322 - RNA, 20 nt, Artificial Sequence
  HTT spacer sequence TTCN PAM
gaauauaaaguuccuguuca

SEQ ID NO: 36323 - RNA, 20 nt, Artificial Sequence
  HTT spacer sequence TTCN PAM
gaaucuaucuguaccuuagg

SEQ ID NO: 36324 - RNA, 20 nt, Artificial Sequence
  HTT spacer sequence TTCN PAM
uguucauucacaugaaacgc

SEQ ID NO: 36325 - RNA, 20 nt, Artificial Sequence
  HTT spacer sequence TTCN PAM
uucacaugaaacgcuaaaag

SEQ ID NO: 36326 - RNA, 20 nt, Artificial Sequence
  HTT spacer sequence TTCN PAM
caugaaacgcuaaaaguucu

SEQ ID NO: 36327 - RNA, 20 nt, Artificial Sequence
  HTT spacer sequence TTCN PAM
ugugaaugaacaggaacuuu

SEQ ID NO: 36328 - RNA, 20 nt, Artificial Sequence
  HTT spacer sequence TTCN PAM
ucacuugaucuuagccaaaa

SEQ ID NO: 36329 - RNA, 20 nt, Artificial Sequence
  HTT spacer sequence TTCN PAM
cuugaucuuagccaaaaggc

SEQ ID NO: 36330 - RNA, 20 nt, Artificial Sequence
  HTT spacer sequence TTCN PAM
uggccuuuuggcuaagauca

SEQ ID NO: 36331 - RNA, 20 nt, Artificial Sequence
  HTT spacer sequence TTCN PAM
uaaaucgaacuugccgugaa

SEQ ID NO: 36332 - RNA, 20 nt, Artificial Sequence
  HTT spacer sequence TTCN PAM
auuuaagaauuuuuaguguu

SEQ ID NO: 36333 - RNA, 20 nt, Artificial Sequence
  HTT spacer sequence TTCN PAM
cggcaaguucgauuuaagaa

SEQ ID NO: 36334 - RNA, 20 nt, Artificial Sequence
  HTT spacer sequence TTCN PAM
gggcuuucuguuuugccuga

SEQ ID NO: 36335 - RNA, 20 nt, Artificial Sequence
  HTT spacer sequence TTCN PAM
guuuugccugaugauuuugc

SEQ ID NO: 36336 - RNA, 20 nt, Artificial Sequence
  HTT spacer sequence TTCN PAM
uuauuuaagcuccagcaaaa

SEQ ID NO: 36337 - RNA, 20 nt, Artificial Sequence
  HTT spacer sequence TTCN PAM
acaggcugggggcuugcaca

SEQ ID NO: 36338 - RNA, 20 nt, Artificial Sequence
  HTT spacer sequence TTCN PAM
uaaaaccacacuagcuccuu

SEQ ID NO: 36339 - RNA, 20 nt, Artificial Sequence
  HTT spacer sequence TTCN PAM
uugagcuuuuugaacugauc

SEQ ID NO: 36340 - RNA, 20 nt, Artificial Sequence
  HTT spacer sequence TTCN PAM
aaaagcucaaagaaagauuu

SEQ ID NO: 36341 - RNA, 20 nt, Artificial Sequence
  HTT spacer sequence TTCN PAM
agcauugcccuauugacccc

SEQ ID NO: 36342 - RNA, 20 nt, Artificial Sequence
  HTT spacer sequence TTCN PAM
agcaaaggagucagggaggg

SEQ ID NO: 36343 - RNA, 20 nt, Artificial Sequence
  HTT spacer sequence TTCN PAM
aaagccuacagauuccagca

SEQ ID NO: 36344 - RNA, 20 nt, Artificial Sequence
  HTT spacer sequence TTCN PAM
cacaucugggaguuugcaag

SEQ ID NO: 36345 - RNA, 20 nt, Artificial Sequence
  HTT spacer sequence TTCN PAM
acucagcgugugugcagaag

SEQ ID NO: 36346 - RNA, 20 nt, Artificial Sequence
  HTT spacer sequence TTCN PAM
gcacacacgcugagucgaaa

SEQ ID NO: 36347 - RNA, 20 nt, Artificial Sequence
  HTT spacer sequence TTCN PAM
gauucacacagccaaaguau

SEQ ID NO: 36348 - RNA, 20 nt, Artificial Sequence
  HTT spacer sequence TTCN PAM
cacagccaaaguauagauua

SEQ ID NO: 36349 - RNA, 20 nt, Artificial Sequence
  HTT spacer sequence TTCN PAM
uggacuuggagggucuuugg

SEQ ID NO: 36350 - RNA, 20 nt, Artificial Sequence
  HTT spacer sequence TTCN PAM
guccaaagacccuccaaguc

SEQ ID NO: 36351 - RNA, 20 nt, Artificial Sequence
  HTT spacer sequence TTCN PAM
cagcacaaaguacugggugu

SEQ ID NO: 36352 - RNA, 20 nt, Artificial Sequence
  HTT spacer sequence TTCN PAM
guggcaugcacgcaugggua

SEQ ID NO: 36353 - RNA, 20 nt, Artificial Sequence
  HTT spacer sequence TTCN PAM
ugugugugcaugucucaggg

SEQ ID NO: 36354 - RNA, 20 nt, Artificial Sequence
  HTT spacer sequence TTCN PAM
cugaggggucagagggugcc

SEQ ID NO: 36355 - RNA, 20 nt, Artificial Sequence
  HTT spacer sequence TTCN PAM
uaugugcucaugacauugag

SEQ ID NO: 36356 - RNA, 20 nt, Artificial Sequence
  HTT spacer sequence TTCN PAM
uuggcacacaggcacacucu

SEQ ID NO: 36357 - RNA, 20 nt, Artificial Sequence
  HTT spacer sequence TTCN PAM
uauauuuuuuuauauguggu

SEQ ID NO: 36358 - RNA, 20 nt, Artificial Sequence
  HTT spacer sequence TTCN PAM
cccaagucuuauuuuggucu

SEQ ID NO: 36359 - RNA, 20 nt, Artificial Sequence
  HTT spacer sequence TTCN PAM
acauaauacauuuagucaaa

SEQ ID NO: 36360 - RNA, 20 nt, Artificial Sequence
  HTT spacer sequence TTCN PAM
gaugaaucaaguagauuauu

SEQ ID NO: 36361 - RNA, 20 nt, Artificial Sequence
  HTT spacer sequence TTCN PAM
ucugaaaagacaauaaagac

SEQ ID NO: 36362 - RNA, 20 nt, Artificial Sequence
  HTT spacer sequence TTCN PAM
ugagaccaggaauguugcug

SEQ ID NO: 36363 - RNA, 20 nt, Artificial Sequence
  HTT spacer sequence TTCN PAM
uggucucaagaauaaucuac

SEQ ID NO: 36364 - RNA, 20 nt, Artificial Sequence
  HTT spacer sequence TTCN PAM
aaauaaccaaaacagcaaca

SEQ ID NO: 36365 - RNA, 20 nt, Artificial Sequence
  HTT spacer sequence TTCN PAM
aauugacuuuugaauuugag

SEQ ID NO: 36366 - RNA, 20 nt, Artificial Sequence
  HTT spacer sequence TTCN PAM
aaagucaauuugaaaaugau

SEQ ID NO: 36367 - RNA, 20 nt, Artificial Sequence
  HTT spacer sequence TTCN PAM
gaagugguguuaaauuauag

SEQ ID NO: 36368 - RNA, 20 nt, Artificial Sequence
  HTT spacer sequence TTCN PAM
gaaaaaaggugacucaaauu

SEQ ID NO: 36369 - RNA, 20 nt, Artificial Sequence
  HTT spacer sequence TTCN PAM
uuuuuuagaagucaucacaa

SEQ ID NO: 36370 - RNA, 20 nt, Artificial Sequence
  HTT spacer sequence TTCN PAM
aaaaaaagaaaaaaaaccua

SEQ ID NO: 36371 - RNA, 20 nt, Artificial Sequence
  HTT spacer sequence TTCN PAM
gaggaagagcuuugaccuuc

SEQ ID NO: 36372 - RNA, 20 nt, Artificial Sequence
  HTT spacer sequence TTCN PAM
ucugaacacugaucauuuug

SEQ ID NO: 36373 - RNA, 20 nt, Artificial Sequence
  HTT spacer sequence TTCN PAM
acaugguauaaugauugaua

SEQ ID NO: 36374 - RNA, 20 nt, Artificial Sequence
  HTT spacer sequence TTCN PAM
ucucuuaccauaaaccaagu

SEQ ID NO: 36375 - RNA, 20 nt, Artificial Sequence
  HTT spacer sequence TTCN PAM
uuauuucuugaaagcauuuu

SEQ ID NO: 36376 - RNA, 20 nt, Artificial Sequence
  HTT spacer sequence TTCN PAM
ugaaagcauuuuguagaugu

SEQ ID NO: 36377 - RNA, 20 nt, Artificial Sequence
  HTT spacer sequence TTCN PAM
agaaauaaagaaaacccuua

SEQ ID NO: 36378 - RNA, 20 nt, Artificial Sequence
  HTT spacer sequence TTCN PAM
aaauguaauuuccaugaaau

SEQ ID NO: 36379 - RNA, 20 nt, Artificial Sequence
  HTT spacer sequence TTCN PAM
augaaaugccugauaagggu

SEQ ID NO: 36380 - RNA, 20 nt, Artificial Sequence
  HTT spacer sequence TTCN PAM
uggaaauuacauuuggaaaa

SEQ ID NO: 36381 - RNA, 20 nt, Artificial Sequence
  HTT spacer sequence TTCN PAM
ucuuaauacaaagaggucgu

SEQ ID NO: 36382 - RNA, 20 nt, Artificial Sequence
  HTT spacer sequence TTCN PAM
ugcaucagcuuuauuuguuc

SEQ ID NO: 36383 - RNA, 20 nt, Artificial Sequence
  HTT spacer sequence TTCN PAM
agcucuuuuccugcaucagc

SEQ ID NO: 36384 - RNA, 20 nt, Artificial Sequence
  HTT spacer sequence TTCN PAM
ucuuaccugaugguacugga

SEQ ID NO: 36385 - RNA, 20 nt, Artificial Sequence
  HTT spacer sequence TTCN PAM
aacauacauuccucuuaccu

SEQ ID NO: 36386 - RNA, 20 nt, Artificial Sequence
  HTT spacer sequence TTCN PAM
aucugcacgggucaauaaag

SEQ ID NO: 36387 - RNA, 20 nt, Artificial Sequence
  HTT spacer sequence TTCN PAM
uuccaucugcacgggucaau

SEQ ID NO: 36388 - RNA, 20 nt, Artificial Sequence
  HTT spacer sequence TTCN PAM
aaguaacacaguuaacagug

SEQ ID NO: 36389 - RNA, 20 nt, Artificial Sequence
  HTT spacer sequence TTCN PAM
ggggccuggguagaugccgg

SEQ ID NO: 36390 - RNA, 20 nt, Artificial Sequence
  HTT spacer sequence TTCN PAM
ccugccuccaccucccgagu

SEQ ID NO: 36391 - RNA, 20 nt, Artificial Sequence
  HTT spacer sequence TTCN PAM
ccaugauggccaagcuguuu

SEQ ID NO: 36392 - RNA, 20 nt, Artificial Sequence
  HTT spacer sequence TTCN PAM
aacuccugaccucaagugau

SEQ ID NO: 36393 - RNA, 20 nt, Artificial Sequence
  HTT spacer sequence TTCN PAM
aaacagcuuggccaucaugg

SEQ ID NO: 36394 - RNA, 20 nt, Artificial Sequence
  HTT spacer sequence TTCN PAM
ccugacuccuggucugagag

SEQ ID NO: 36395 - RNA, 20 nt, Artificial Sequence
  HTT spacer sequence TTCN PAM
agauagugaggcccucuuuu

SEQ ID NO: 36396 - RNA, 20 nt, Artificial Sequence
  HTT spacer sequence TTCN PAM
aaaacgaggaccaaaaauca

SEQ ID NO: 36397 - RNA, 20 nt, Artificial Sequence
  HTT spacer sequence TTCN PAM
accaucuugaccaacacugu

SEQ ID NO: 36398 - RNA, 20 nt, Artificial Sequence
  HTT spacer sequence TTCN PAM
aucauuuuaagguuucuacc

SEQ ID NO: 36399 - RNA, 20 nt, Artificial Sequence
  HTT spacer sequence TTCN PAM
gaguugagauuucuaucauu

SEQ ID NO: 36400 - RNA, 20 nt, Artificial Sequence
  HTT spacer sequence TTCN PAM
uugagcugauuucugguuuu

SEQ ID NO: 36401 - RNA, 20 nt, Artificial Sequence
  HTT spacer sequence TTCN PAM
gguuuuguuuucuuaaagug

SEQ ID NO: 36402 - RNA, 20 nt, Artificial Sequence
  HTT spacer sequence TTCN PAM
uaaaguggcauaagaauuca

SEQ ID NO: 36403 - RNA, 20 nt, Artificial Sequence
  HTT spacer sequence TTCN PAM
uaugccacuuuaagaaaaca

SEQ ID NO: 36404 - RNA, 20 nt, Artificial Sequence
  HTT spacer sequence TTCN PAM
aagacauuuugaggaaggcu

SEQ ID NO: 36405 - RNA, 20 nt, Artificial Sequence
  HTT spacer sequence TTCN PAM
ucaaaaugucuuugaauucu

SEQ ID NO: 36406 - RNA, 20 nt, Artificial Sequence
  HTT spacer sequence TTCN PAM
gcacucagccuuccucaaaa

SEQ ID NO: 36407 - RNA, 20 nt, Artificial Sequence
  HTT spacer sequence TTCN PAM
ccuuucuuuuaacuugcacu

SEQ ID NO: 36408 - RNA, 20 nt, Artificial Sequence
  HTT spacer sequence TTCN PAM
uuuaacuugcacuguugucu

SEQ ID NO: 36409 - RNA, 20 nt, Artificial Sequence
  HTT spacer sequence TTCN PAM
uuuuagcuguuugucuuuga

SEQ ID NO: 36410 - RNA, 20 nt, Artificial Sequence
  HTT spacer sequence TTCN PAM
aagacaaacagcuaaaaaga

SEQ ID NO: 36411 - RNA, 20 nt, Artificial Sequence
  HTT spacer sequence TTCN PAM
uaaagccauagcuuuucuca

SEQ ID NO: 36412 - RNA, 20 nt, Artificial Sequence
  HTT spacer sequence TTCN PAM
cauaagaagcagcacuuucu

SEQ ID NO: 36413 - RNA, 20 nt, Artificial Sequence
  HTT spacer sequence TTCN PAM
uaugagaaaagcuauggcuu

SEQ ID NO: 36414 - RNA, 20 nt, Artificial Sequence
  HTT spacer sequence TTCN PAM
uuguucauucauauuuuaau

SEQ ID NO: 36415 - RNA, 20 nt, Artificial Sequence
  HTT spacer sequence TTCN PAM
uucauauuuuaaugaacccc

SEQ ID NO: 36416 - RNA, 20 nt, Artificial Sequence
  HTT spacer sequence TTCN PAM
uauuuuaaugaaccccugua

SEQ ID NO: 36417 - RNA, 20 nt, Artificial Sequence
  HTT spacer sequence TTCN PAM
uuaaaauaugaaugaacaaa

SEQ ID NO: 36418 - RNA, 20 nt, Artificial Sequence
  HTT spacer sequence TTCN PAM
gaccucuuuaugauacaugu

SEQ ID NO: 36419 - RNA, 20 nt, Artificial Sequence
  HTT spacer sequence TTCN PAM
ucagccacauguucagugag

SEQ ID NO: 36420 - RNA, 20 nt, Artificial Sequence
  HTT spacer sequence TTCN PAM
gugagcucuggauaugucug

SEQ ID NO: 36421 - RNA, 20 nt, Artificial Sequence
  HTT spacer sequence TTCN PAM
aaacagacauauccagagcu

SEQ ID NO: 36422 - RNA, 20 nt, Artificial Sequence
  HTT spacer sequence TTCN PAM
cagagguauacaugguugag

SEQ ID NO: 36423 - RNA, 20 nt, Artificial Sequence
  HTT spacer sequence TTCN PAM
guagauugccucugcagaga

SEQ ID NO: 36424 - RNA, 20 nt, Artificial Sequence
  HTT spacer sequence TTCN PAM
cugcagaggcaaucuacuga

SEQ ID NO: 36425 - RNA, 20 nt, Artificial Sequence
  HTT spacer sequence TTCN PAM
guguucucugcagaggcaau

SEQ ID NO: 36426 - RNA, 20 nt, Artificial Sequence
  HTT spacer sequence TTCN PAM
auucuguguucucugcagag

SEQ ID NO: 36427 - RNA, 20 nt, Artificial Sequence
  HTT spacer sequence TTCN PAM
cuucaauucuguguucucug

SEQ ID NO: 36428 - RNA, 20 nt, Artificial Sequence
  HTT spacer sequence TTCN PAM
gcagguggcucauugccuuu

SEQ ID NO: 36429 - RNA, 20 nt, Artificial Sequence
  HTT spacer sequence TTCN PAM
aacacagccuugacuaaacu

SEQ ID NO: 36430 - RNA, 20 nt, Artificial Sequence
  HTT spacer sequence TTCN PAM
uguugugccuuuucucugau

SEQ ID NO: 36431 - RNA, 20 nt, Artificial Sequence
  HTT spacer sequence TTCN PAM
cugauugugaaauauuacaa

SEQ ID NO: 36432 - RNA, 20 nt, Artificial Sequence
  HTT spacer sequence TTCN PAM
caaucagagaaaaggcacaa

SEQ ID NO: 36433 - RNA, 20 nt, Artificial Sequence
  HTT spacer sequence TTCN PAM
auacaaauaacaaugauggc

SEQ ID NO: 36434 - RNA, 20 nt, Artificial Sequence
  HTT spacer sequence TTCN PAM
ucuagggcacauacaaggug

SEQ ID NO: 36435 - RNA, 20 nt, Artificial Sequence
  HTT spacer sequence TTCN PAM
uucugauuccccuacauuuc

SEQ ID NO: 36436 - RNA, 20 nt, Artificial Sequence
  HTT spacer sequence TTCN PAM
gauuccccuacauuucucau

SEQ ID NO: 36437 - RNA, 20 nt, Artificial Sequence
  HTT spacer sequence TTCN PAM
ccuacauuucucaugucaua

SEQ ID NO: 36438 - RNA, 20 nt, Artificial Sequence
  HTT spacer sequence TTCN PAM
caugucauagaguggggguu

SEQ ID NO: 36439 - RNA, 20 nt, Artificial Sequence
  HTT spacer sequence TTCN PAM
agcugaacugggacaaguau

SEQ ID NO: 36440 - RNA, 20 nt, Artificial Sequence
  HTT spacer sequence TTCN PAM
gcuggaagacucuaggaucc

SEQ ID NO: 36441 - RNA, 20 nt, Artificial Sequence
  HTT spacer sequence TTCN PAM
accccuacguguccgucugu

SEQ ID NO: 36442 - RNA, 20 nt, Artificial Sequence
  HTT spacer sequence TTCN PAM
aauugugcacgcucuuauag

SEQ ID NO: 36443 - RNA, 20 nt, Artificial Sequence
  HTT spacer sequence TTCN PAM
uucuuguccugcagcagugc

SEQ ID NO: 36444 - RNA, 20 nt, Artificial Sequence
  HTT spacer sequence TTCN PAM
uguccugcagcagugccaca

SEQ ID NO: 36445 - RNA, 20 nt, Artificial Sequence
  HTT spacer sequence TTCN PAM
ccuuguggcacugcugcagg

SEQ ID NO: 36446 - RNA, 20 nt, Artificial Sequence
  HTT spacer sequence TTCN PAM
uucuccuuguggcacugcug

SEQ ID NO: 36447 - RNA, 20 nt, Artificial Sequence
  HTT spacer sequence TTCN PAM
acuugucuucauucuccuug

SEQ ID NO: 36448 - RNA, 20 nt, Artificial Sequence
  HTT spacer sequence TTCN PAM
caaggaccuuaagcuaccau

SEQ ID NO: 36449 - RNA, 20 nt, Artificial Sequence
  HTT spacer sequence TTCN PAM
agccacccaccuuucacaag

SEQ ID NO: 36450 - RNA, 20 nt, Artificial Sequence
  HTT spacer sequence TTCN PAM
uucaguccuaaucugugccu

SEQ ID NO: 36451 - RNA, 20 nt, Artificial Sequence
  HTT spacer sequence TTCN PAM
guccuaaucugugccuugau

SEQ ID NO: 36452 - RNA, 20 nt, Artificial Sequence
  HTT spacer sequence TTCN PAM
ccgugcuagucaugggacag

SEQ ID NO: 36453 - RNA, 20 nt, Artificial Sequence
  HTT spacer sequence TTCN PAM
uuucuucucacaaugccauc

SEQ ID NO: 36454 - RNA, 20 nt, Artificial Sequence
  HTT spacer sequence TTCN PAM
ucucacaaugccaucucagg

SEQ ID NO: 36455 - RNA, 20 nt, Artificial Sequence
  HTT spacer sequence TTCN PAM
cacaaugccaucucagguug

SEQ ID NO: 36456 - RNA, 20 nt, Artificial Sequence
  HTT spacer sequence TTCN PAM
ggcuuuagaguuagccuugg

SEQ ID NO: 36457 - RNA, 20 nt, Artificial Sequence
  HTT spacer sequence TTCN PAM
ggucaacccaguguuuuauu

SEQ ID NO: 36458 - RNA, 20 nt, Artificial Sequence
  HTT spacer sequence TTCN PAM
uuuccuuucccuuccuuucc

SEQ ID NO: 36459 - RNA, 20 nt, Artificial Sequence
  HTT spacer sequence TTCN PAM
uuucccuuccuuuccuuucc

SEQ ID NO: 36460 - RNA, 20 nt, Artificial Sequence
  HTT spacer sequence TTCN PAM
cuuccuuuccuuuccgacag

SEQ ID NO: 36461 - RNA, 20 nt, Artificial Sequence
  HTT spacer sequence TTCN PAM
uuuccuuuccgacagggucu

SEQ ID NO: 36462 - RNA, 20 nt, Artificial Sequence
  HTT spacer sequence TTCN PAM
uuuccgacagggucucacuc

SEQ ID NO: 36463 - RNA, 20 nt, Artificial Sequence
  HTT spacer sequence TTCN PAM
gacagggucucacucuguca

SEQ ID NO: 36464 - RNA, 20 nt, Artificial Sequence
  HTT spacer sequence TTCN PAM
accaauucucccaccucagc

SEQ ID NO: 36465 - RNA, 20 nt, Artificial Sequence
  HTT spacer sequence TTCN PAM
cccaccucagccuccugagu

SEQ ID NO: 36466 - RNA, 20 nt, Artificial Sequence
  HTT spacer sequence TTCN PAM
ucacuaaucagaauuucuau

SEQ ID NO: 36467 - RNA, 20 nt, Artificial Sequence
  HTT spacer sequence TTCN PAM
gauuagugaugaauaggcca

SEQ ID NO: 36468 - RNA, 20 nt, Artificial Sequence
  HTT spacer sequence TTCN PAM
augaucaaaugacaugaauc

SEQ ID NO: 36469 - RNA, 20 nt, Artificial Sequence
  HTT spacer sequence TTCN PAM
ugucauuugaucauagaaau

SEQ ID NO: 36470 - RNA, 20 nt, Artificial Sequence
  HTT spacer sequence TTCN PAM
acaacugcaguggaaggaaa

SEQ ID NO: 36471 - RNA, 20 nt, Artificial Sequence
  HTT spacer sequence TTCN PAM
acugcaguuguggaaacaau

SEQ ID NO: 36472 - RNA, 20 nt, Artificial Sequence
  HTT spacer sequence TTCN PAM
uuccacugcaguuguggaaa

SEQ ID NO: 36473 - RNA, 20 nt, Artificial Sequence
  HTT spacer sequence TTCN PAM
gaagcagccugcccccaguc

SEQ ID NO: 36474 - RNA, 20 nt, Artificial Sequence
  HTT spacer sequence TTCN PAM
gaaacuggcacugccaggcc

SEQ ID NO: 36475 - RNA, 20 nt, Artificial Sequence
  HTT spacer sequence TTCN PAM
cugugagcuacagaggugcu

SEQ ID NO: 36476 - RNA, 20 nt, Artificial Sequence
  HTT spacer sequence TTCN PAM
ggcagagcugccucaaggag

SEQ ID NO: 36477 - RNA, 20 nt, Artificial Sequence
  HTT spacer sequence TTCN PAM
ucuugauuauacacaauaaa

SEQ ID NO: 36478 - RNA, 20 nt, Artificial Sequence
  HTT spacer sequence TTCN PAM
ugacugcacccccauucuga

SEQ ID NO: 36479 - RNA, 20 nt, Artificial Sequence
  HTT spacer sequence TTCN PAM
gauuucauaauggaauguua

SEQ ID NO: 36480 - RNA, 20 nt, Artificial Sequence
  HTT spacer sequence TTCN PAM
uaauggaauguuaucuugag

SEQ ID NO: 36481 - RNA, 20 nt, Artificial Sequence
  HTT spacer sequence TTCN PAM
auuaugaaaucagaaugggg

SEQ ID NO: 36482 - RNA, 20 nt, Artificial Sequence
  HTT spacer sequence TTCN PAM
ggugagauugacagcaguuu

SEQ ID NO: 36483 - RNA, 20 nt, Artificial Sequence
  HTT spacer sequence TTCN PAM
aaaaccaucuguaggcaggg

SEQ ID NO: 36484 - RNA, 20 nt, Artificial Sequence
  HTT spacer sequence TTCN PAM
agggcaccauucuaaaacca

SEQ ID NO: 36485 - RNA, 20 nt, Artificial Sequence
  HTT spacer sequence TTCN PAM
uuucugugcguaaucugagu

SEQ ID NO: 36486 - RNA, 20 nt, Artificial Sequence
  HTT spacer sequence TTCN PAM
gugcguaaucugaguagagu

SEQ ID NO: 36487 - RNA, 20 nt, Artificial Sequence
  HTT spacer sequence TTCN PAM
aucuccacucuacucagauu

SEQ ID NO: 36488 - RNA, 20 nt, Artificial Sequence
  HTT spacer sequence TTCN PAM
ggccuucgaucuccacucua

SEQ ID NO: 36489 - RNA, 20 nt, Artificial Sequence
  HTT spacer sequence TTCN PAM
auugcggcagauauuaaguc

SEQ ID NO: 36490 - RNA, 20 nt, Artificial Sequence
  HTT spacer sequence TTCN PAM
uaaauguuguaucacacaau

SEQ ID NO: 36491 - RNA, 20 nt, Artificial Sequence
  HTT spacer sequence TTCN PAM
gaaguagugcuagauacuau

SEQ ID NO: 36492 - RNA, 20 nt, Artificial Sequence
  HTT spacer sequence TTCN PAM
gaaugcaacaugcaccugug

SEQ ID NO: 36493 - RNA, 20 nt, Artificial Sequence
  HTT spacer sequence TTCN PAM
uuaaucugcuuugaucacug

SEQ ID NO: 36494 - RNA, 20 nt, Artificial Sequence
  HTT spacer sequence TTCN PAM
uggagugaagauuuuguugg

SEQ ID NO: 36495 - RNA, 20 nt, Artificial Sequence
  HTT spacer sequence TTCN PAM
cuccaagaaggcaggggguc

SEQ ID NO: 36496 - RNA, 20 nt, Artificial Sequence
  HTT spacer sequence TTCN PAM
auugucuguccccuuacccg

SEQ ID NO: 36497 - RNA, 20 nt, Artificial Sequence
  HTT spacer sequence TTCN PAM
cucacuugcuuuucuauugu

SEQ ID NO: 36498 - RNA, 20 nt, Artificial Sequence
  HTT spacer sequence TTCN PAM
ugaucagccgccaugguaua

SEQ ID NO: 36499 - RNA, 20 nt, Artificial Sequence
  HTT spacer sequence TTCN PAM
guacgguguuccugaucagc

SEQ ID NO: 36500 - RNA, 20 nt, Artificial Sequence
  HTT spacer sequence TTCN PAM
ucuguacgguguuccugauc

SEQ ID NO: 36501 - RNA, 20 nt, Artificial Sequence
  HTT spacer sequence TTCN PAM
cuccuggauucuucuguacg

SEQ ID NO: 36502 - RNA, 20 nt, Artificial Sequence
  HTT spacer sequence TTCN PAM
gcuggugaugagaagaagcu

SEQ ID NO: 36503 - RNA, 20 nt, Artificial Sequence
  HTT spacer sequence TTCN PAM
caucaccagcugaacaaugc

SEQ ID NO: 36504 - RNA, 20 nt, Artificial Sequence
  HTT spacer sequence TTCN PAM
ucucaucaccagcugaacaa

SEQ ID NO: 36505 - RNA, 20 nt, Artificial Sequence
  HTT spacer sequence TTCN PAM
cucaaaugucaccagaucac

SEQ ID NO: 36506 - RNA, 20 nt, Artificial Sequence
  HTT spacer sequence TTCN PAM
gcaaauucacucaaauguca

SEQ ID NO: 36507 - RNA, 20 nt, Artificial Sequence
  HTT spacer sequence TTCN PAM
uuucugcaaauucacucaaa

SEQ ID NO: 36508 - RNA, 20 nt, Artificial Sequence
  HTT spacer sequence TTCN PAM
ccagguaucuccuaggcuug

SEQ ID NO: 36509 - RNA, 20 nt, Artificial Sequence
  HTT spacer sequence TTCN PAM
uuccccagguaucuccuagg

SEQ ID NO: 36510 - RNA, 20 nt, Artificial Sequence
  HTT spacer sequence TTCN PAM
aggcagagcaaauagcagug

SEQ ID NO: 36511 - RNA, 20 nt, Artificial Sequence
  HTT spacer sequence TTCN PAM
cuccccauggcugccccacu

SEQ ID NO: 36512 - RNA, 20 nt, Artificial Sequence
  HTT spacer sequence TTCN PAM
uauuccugaguugagaauag

SEQ ID NO: 36513 - RNA, 20 nt, Artificial Sequence
  HTT spacer sequence TTCN PAM
ugaguugagaauagccuuga

SEQ ID NO: 36514 - RNA, 20 nt, Artificial Sequence
  HTT spacer sequence TTCN PAM
caacucaggaauaagaauga

SEQ ID NO: 36515 - RNA, 20 nt, Artificial Sequence
  HTT spacer sequence TTCN PAM
acuccagugccgggucucac

SEQ ID NO: 36516 - RNA, 20 nt, Artificial Sequence
  HTT spacer sequence TTCN PAM
ugcugccaagggaugcugac

SEQ ID NO: 36517 - RNA, 20 nt, Artificial Sequence
  HTT spacer sequence TTCN PAM
gggugaggacaggguggcug

SEQ ID NO: 36518 - RNA, 20 nt, Artificial Sequence
  HTT spacer sequence TTCN PAM
agcuccuccuccucuccagc

SEQ ID NO: 36519 - RNA, 20 nt, Artificial Sequence
  HTT spacer sequence TTCN PAM
uaaagccaagauuuuuuuua

SEQ ID NO: 36520 - RNA, 20 nt, Artificial Sequence
  HTT spacer sequence TTCN PAM
caaggugcugacagcagaug

SEQ ID NO: 36521 - RNA, 20 nt, Artificial Sequence
  HTT spacer sequence TTCN PAM
cauuaggguuuggcucccuu

SEQ ID NO: 36522 - RNA, 20 nt, Artificial Sequence
  HTT spacer sequence TTCN PAM
ugaaaggacaggagagagac

SEQ ID NO: 36523 - RNA, 20 nt, Artificial Sequence
  HTT spacer sequence TTCN PAM
ggaacacauucccauuaggg

SEQ ID NO: 36524 - RNA, 20 nt, Artificial Sequence
  HTT spacer sequence TTCN PAM
caagucucucuccuguccuu

SEQ ID NO: 36525 - RNA, 20 nt, Artificial Sequence
  HTT spacer sequence TTCN PAM
aguaaaaccuuuucccaagu

SEQ ID NO: 36526 - RNA, 20 nt, Artificial Sequence
  HTT spacer sequence TTCN PAM
cucuucaaguaaaaccuuuu

SEQ ID NO: 36527 - RNA, 20 nt, Artificial Sequence
  HTT spacer sequence TTCN PAM
ccguucccucuucaaguaaa

SEQ ID NO: 36528 - RNA, 20 nt, Artificial Sequence
  HTT spacer sequence TTCN PAM
gccaacuuaacccauugccg

SEQ ID NO: 36529 - RNA, 20 nt, Artificial Sequence
  HTT spacer sequence TTCN PAM
uuucugccaacuuaacccau

SEQ ID NO: 36530 - RNA, 20 nt, Artificial Sequence
  HTT spacer sequence TTCN PAM
gcccucagugcguaaacagg

SEQ ID NO: 36531 - RNA, 20 nt, Artificial Sequence
  HTT spacer sequence TTCN PAM
ugacacaggagacacaaauc

SEQ ID NO: 36532 - RNA, 20 nt, Artificial Sequence
  HTT spacer sequence TTCN PAM
cagacauggguuaggauugg

SEQ ID NO: 36533 - RNA, 20 nt, Artificial Sequence
  HTT spacer sequence TTCN PAM
cccagaguugcuggggagga

SEQ ID NO: 36534 - RNA, 20 nt, Artificial Sequence
  HTT spacer sequence TTCN PAM
ugcauccuggacccucgccu

SEQ ID NO: 36535 - RNA, 20 nt, Artificial Sequence
  HTT spacer sequence TTCN PAM
cuuguuguaagauguggcca

SEQ ID NO: 36536 - RNA, 20 nt, Artificial Sequence
  HTT spacer sequence TTCN PAM
caucugugccuugaaaaaca

SEQ ID NO: 36537 - RNA, 20 nt, Artificial Sequence
  HTT spacer sequence TTCN PAM
aggcacagaugugaagcuca

SEQ ID NO: 36538 - RNA, 20 nt, Artificial Sequence
  HTT spacer sequence TTCN PAM
acugaguguguauacauagu

SEQ ID NO: 36539 - RNA, 20 nt, Artificial Sequence
  HTT spacer sequence TTCN PAM
aauuuuuguuucuacugagu

SEQ ID NO: 36540 - RNA, 20 nt, Artificial Sequence
  HTT spacer sequence TTCN PAM
accauuacuuauugauggug

SEQ ID NO: 36541 - RNA, 20 nt, Artificial Sequence
  HTT spacer sequence TTCN PAM
ggccaggugugguggcucau

SEQ ID NO: 36542 - RNA, 20 nt, Artificial Sequence
  HTT spacer sequence TTCN PAM
ccauguugcccaggcugguc

SEQ ID NO: 36543 - RNA, 20 nt, Artificial Sequence
  HTT spacer sequence TTCN PAM
aguagagacaggguuucacc

SEQ ID NO: 36544 - RNA, 20 nt, Artificial Sequence
  HTT spacer sequence TTCN PAM
ugcgccacugcacuccuggg

SEQ ID NO: 36545 - RNA, 20 nt, Artificial Sequence
  HTT spacer sequence TTCN PAM
aacagagucucacucugugc

SEQ ID NO: 36546 - RNA, 20 nt, Artificial Sequence
  HTT spacer sequence TTCN PAM
cucucucucuuucuaacaga

SEQ ID NO: 36547 - RNA, 20 nt, Artificial Sequence
  HTT spacer sequence TTCN PAM
uucucucucucucuuucuaa

SEQ ID NO: 36548 - RNA, 20 nt, Artificial Sequence
  HTT spacer sequence TTCN PAM
ucccucccucucucuucuuu

SEQ ID NO: 36549 - RNA, 20 nt, Artificial Sequence
  HTT spacer sequence TTCN PAM
uuccucccucccucucucuu

SEQ ID NO: 36550 - RNA, 20 nt, Artificial Sequence
  HTT spacer sequence TTCN PAM
uuccuuccucccucccucuc

SEQ ID NO: 36551 - RNA, 20 nt, Artificial Sequence
  HTT spacer sequence TTCN PAM
uuccuuccuuccucccuccc

SEQ ID NO: 36552 - RNA, 20 nt, Artificial Sequence
  HTT spacer sequence TTCN PAM
auuuauuuccuuccuuccuu

SEQ ID NO: 36553 - RNA, 20 nt, Artificial Sequence
  HTT spacer sequence TTCN PAM
uccauuuauuuccuuccuuc

SEQ ID NO: 36554 - RNA, 20 nt, Artificial Sequence
  HTT spacer sequence TTCN PAM
auuucuuccauuuauuuccu

SEQ ID NO: 36555 - RNA, 20 nt, Artificial Sequence
  HTT spacer sequence TTCN PAM
ucccuuccauuucuuccauu

SEQ ID NO: 36556 - RNA, 20 nt, Artificial Sequence
  HTT spacer sequence TTCN PAM
ucccuccccuuccucccuuc

SEQ ID NO: 36557 - RNA, 20 nt, Artificial Sequence
  HTT spacer sequence TTCN PAM
uuccucccuccccuuccucc

SEQ ID NO: 36558 - RNA, 20 nt, Artificial Sequence
  HTT spacer sequence TTCN PAM
uccuuccucccuccccuucc

SEQ ID NO: 36559 - RNA, 20 nt, Artificial Sequence
  HTT spacer sequence TTCN PAM
uuucuuccuuccucccuccc

SEQ ID NO: 36560 - RNA, 20 nt, Artificial Sequence
  HTT spacer sequence TTCN PAM
gccaguugccuugggaguuc

SEQ ID NO: 36561 - RNA, 20 nt, Artificial Sequence
  HTT spacer sequence TTCN PAM
ccauugcacuggguuaagug

SEQ ID NO: 36562 - RNA, 20 nt, Artificial Sequence
  HTT spacer sequence TTCN PAM
cacuuaacccagugcaaugg

SEQ ID NO: 36563 - RNA, 20 nt, Artificial Sequence
  HTT spacer sequence TTCN PAM
aaacaacuaaaacaaaaccu

SEQ ID NO: 36564 - RNA, 20 nt, Artificial Sequence
  HTT spacer sequence TTCN PAM
uauagccauauccuugcccc

SEQ ID NO: 36565 - RNA, 20 nt, Artificial Sequence
  HTT spacer sequence TTCN PAM
uaaucugccccauguuccua

SEQ ID NO: 36566 - RNA, 20 nt, Artificial Sequence
  HTT spacer sequence TTCN PAM
gcacuccaucccucccacaa

SEQ ID NO: 36567 - RNA, 20 nt, Artificial Sequence
  HTT spacer sequence TTCN PAM
uuuucugcacuccaucccuc

SEQ ID NO: 36568 - RNA, 20 nt, Artificial Sequence
  HTT spacer sequence TTCN PAM
aagcgucccuuuguauacac

SEQ ID NO: 36569 - RNA, 20 nt, Artificial Sequence
  HTT spacer sequence TTCN PAM
cacuuuuguauauuugaguc

SEQ ID NO: 36570 - RNA, 20 nt, Artificial Sequence
  HTT spacer sequence TTCN PAM
guaaaagacucaaauauaca

SEQ ID NO: 36571 - RNA, 20 nt, Artificial Sequence
  HTT spacer sequence TTCN PAM
guuaugggaaaaauguagcu

SEQ ID NO: 36572 - RNA, 20 nt, Artificial Sequence
  HTT spacer sequence TTCN PAM
cauaacagaaaucuugucau

SEQ ID NO: 36573 - RNA, 20 nt, Artificial Sequence
  HTT spacer sequence TTCN PAM
ccacugaacuuaaaaugcuu

SEQ ID NO: 36574 - RNA, 20 nt, Artificial Sequence
  HTT spacer sequence TTCN PAM
guggugaaccaagcaaacau

SEQ ID NO: 36575 - RNA, 20 nt, Artificial Sequence
  HTT spacer sequence TTCN PAM
cucauuuaaaagcauuuuaa

SEQ ID NO: 36576 - RNA, 20 nt, Artificial Sequence
  HTT spacer sequence TTCN PAM
uguacaccagcuauguaacu

SEQ ID NO: 36577 - RNA, 20 nt, Artificial Sequence
  HTT spacer sequence TTCN PAM
uuuggcuuacguagaaaugu

SEQ ID NO: 36578 - RNA, 20 nt, Artificial Sequence
  HTT spacer sequence TTCN PAM
acguaagccaaaagaaacga

SEQ ID NO: 36579 - RNA, 20 nt, Artificial Sequence
  HTT spacer sequence TTCN PAM
acagaugcacauugacucuc

SEQ ID NO: 36580 - RNA, 20 nt, Artificial Sequence
  HTT spacer sequence TTCN PAM
ugagagucaaugugcaucug

SEQ ID NO: 36581 - RNA, 20 nt, Artificial Sequence
  HTT spacer sequence TTCN PAM
ucccuccguccgguagacau

SEQ ID NO: 36582 - RNA, 20 nt, Artificial Sequence
  HTT spacer sequence TTCN PAM
ucacuccaaacacaauggug

SEQ ID NO: 36583 - RNA, 20 nt, Artificial Sequence
  HTT spacer sequence TTCN PAM
ucugcugagccaggcgagag

SEQ ID NO: 36584 - RNA, 20 nt, Artificial Sequence
  HTT spacer sequence TTCN PAM
ggcucugauuacugggacca

SEQ ID NO: 36585 - RNA, 20 nt, Artificial Sequence
  HTT spacer sequence TTCN PAM
ggggguggucccaguaauca

SEQ ID NO: 36586 - RNA, 20 nt, Artificial Sequence
  HTT spacer sequence TTCN PAM
ugagaguuugcuuuuuuuuu

SEQ ID NO: 36587 - RNA, 20 nt, Artificial Sequence
  HTT spacer sequence TTCN PAM
gcaccacccccacaccaaaa

SEQ ID NO: 36588 - RNA, 20 nt, Artificial Sequence
  HTT spacer sequence TTCN PAM
agcuucacaccauucuccug

SEQ ID NO: 36589 - RNA, 20 nt, Artificial Sequence
  HTT spacer sequence TTCN PAM
caccauucuccugccucagc

SEQ ID NO: 36590 - RNA, 20 nt, Artificial Sequence
  HTT spacer sequence TTCN PAM
ccugccucagccucccgagu

SEQ ID NO: 36591 - RNA, 20 nt, Artificial Sequence
  HTT spacer sequence TTCN PAM
ccguguuagccaggaugguc

SEQ ID NO: 36592 - RNA, 20 nt, Artificial Sequence
  HTT spacer sequence TTCN PAM
agcaauuuuccugccucagc

SEQ ID NO: 36593 - RNA, 20 nt, Artificial Sequence
  HTT spacer sequence TTCN PAM
ugccucagccucccgaguag

SEQ ID NO: 36594 - RNA, 20 nt, Artificial Sequence
  HTT spacer sequence TTCN PAM
cuguguuagccaggaugguc

SEQ ID NO: 36595 - RNA, 20 nt, Artificial Sequence
  HTT spacer sequence TTCN PAM
caggugaaacuaaugccugc

SEQ ID NO: 36596 - RNA, 20 nt, Artificial Sequence
  HTT spacer sequence TTCN PAM
ccugggaauuugcuaaaaau

SEQ ID NO: 36597 - RNA, 20 nt, Artificial Sequence
  HTT spacer sequence TTCN PAM
gggagcacacuuugggacuc

SEQ ID NO: 36598 - RNA, 20 nt, Artificial Sequence
  HTT spacer sequence TTCN PAM
uucacaaaauuggcaauugg

SEQ ID NO: 36599 - RNA, 20 nt, Artificial Sequence
  HTT spacer sequence TTCN PAM
caaaauuggcaauuggggga

SEQ ID NO: 36600 - RNA, 20 nt, Artificial Sequence
  HTT spacer sequence TTCN PAM
cccaauugccaauuuuguga

SEQ ID NO: 36601 - RNA, 20 nt, Artificial Sequence
  HTT spacer sequence TTCN PAM
uuuuuucuucagcugugacu

SEQ ID NO: 36602 - RNA, 20 nt, Artificial Sequence
  HTT spacer sequence TTCN PAM
ucagcugugacuuauguauu

SEQ ID NO: 36603 - RNA, 20 nt, Artificial Sequence
  HTT spacer sequence TTCN PAM
gcugugacuuauguauuaug

SEQ ID NO: 36604 - RNA, 20 nt, Artificial Sequence
  HTT spacer sequence TTCN PAM
acuguggauaucgggaauuc

SEQ ID NO: 36605 - RNA, 20 nt, Artificial Sequence
  HTT spacer sequence TTCN PAM
cgauauccacaguugaacag

SEQ ID NO: 36606 - RNA, 20 nt, Artificial Sequence
  HTT spacer sequence TTCN PAM
ggccauuuugaggguucuga

SEQ ID NO: 36607 - RNA, 20 nt, Artificial Sequence
  HTT spacer sequence TTCN PAM
gauuucccagucaacugaag

SEQ ID NO: 36608 - RNA, 20 nt, Artificial Sequence
  HTT spacer sequence TTCN PAM
cagucaacugaagauauugu

SEQ ID NO: 36609 - RNA, 20 nt, Artificial Sequence
  HTT spacer sequence TTCN PAM
guugacugggaaaucagaac

SEQ ID NO: 36610 - RNA, 20 nt, Artificial Sequence
  HTT spacer sequence TTCN PAM
uucucguauucaggagcucu

SEQ ID NO: 36611 - RNA, 20 nt, Artificial Sequence
  HTT spacer sequence TTCN PAM
cguauucaggagcucuccuu

SEQ ID NO: 36612 - RNA, 20 nt, Artificial Sequence
  HTT spacer sequence TTCN PAM
ggagcucuccuucucuccgu

SEQ ID NO: 36613 - RNA, 20 nt, Artificial Sequence
  HTT spacer sequence TTCN PAM
cuccguauuuaaucuccugu

SEQ ID NO: 36614 - RNA, 20 nt, Artificial Sequence
  HTT spacer sequence TTCN PAM
acgcuagaagaacacaguga

SEQ ID NO: 36615 - RNA, 20 nt, Artificial Sequence
  HTT spacer sequence TTCN PAM
agcguugaaguacugucccc

SEQ ID NO: 36616 - RNA, 20 nt, Artificial Sequence
  HTT spacer sequence TTCN PAM
ucuagcguugaaguacuguc

SEQ ID NO: 36617 - RNA, 20 nt, Artificial Sequence
  HTT spacer sequence TTCN PAM
cuguguucuucuagcguuga

SEQ ID NO: 36618 - RNA, 20 nt, Artificial Sequence
  HTT spacer sequence TTCN PAM
cuucacuguguucuucuagc

SEQ ID NO: 36619 - RNA, 20 nt, Artificial Sequence
  HTT spacer sequence TTCN PAM
uuauuuguuucccuucacug

SEQ ID NO: 36620 - RNA, 20 nt, Artificial Sequence
  HTT spacer sequence TTCN PAM
ggcaaauucuuuauuuguuu

SEQ ID NO: 36621 - RNA, 20 nt, Artificial Sequence
  HTT spacer sequence TTCN PAM
ucuggcaaauucuuuauuug

SEQ ID NO: 36622 - RNA, 20 nt, Artificial Sequence
  HTT spacer sequence TTCN PAM
agguaugcuuucuaucugag

SEQ ID NO: 36623 - RNA, 20 nt, Artificial Sequence
  HTT spacer sequence TTCN PAM
aucugagccuauaacuaacc

SEQ ID NO: 36624 - RNA, 20 nt, Artificial Sequence
  HTT spacer sequence TTCN PAM
caaaaggcauggguuaguua

SEQ ID NO: 36625 - RNA, 20 nt, Artificial Sequence
  HTT spacer sequence TTCN PAM
cagucaguaagucuggaaua

SEQ ID NO: 36626 - RNA, 20 nt, Artificial Sequence
  HTT spacer sequence TTCN PAM
agacuuacugacugugaaac

SEQ ID NO: 36627 - RNA, 20 nt, Artificial Sequence
  HTT spacer sequence TTCN PAM
cuucugaguuggguaaagaa

SEQ ID NO: 36628 - RNA, 20 nt, Artificial Sequence
  HTT spacer sequence TTCN PAM
gaguuggguaaagaagucug

SEQ ID NO: 36629 - RNA, 20 nt, Artificial Sequence
  HTT spacer sequence TTCN PAM
uuacccaacucagaagugaa

SEQ ID NO: 36630 - RNA, 20 nt, Artificial Sequence
  HTT spacer sequence TTCN PAM
aauccguccugcauuaucua

SEQ ID NO: 36631 - RNA, 20 nt, Artificial Sequence
  HTT spacer sequence TTCN PAM
uaccugucuugaaguucugu

SEQ ID NO: 36632 - RNA, 20 nt, Artificial Sequence
  HTT spacer sequence TTCN PAM
agacagguaugaaccaagag

SEQ ID NO: 36633 - RNA, 20 nt, Artificial Sequence
  HTT spacer sequence TTCN PAM
gucauguucugucucuuguc

SEQ ID NO: 36634 - RNA, 20 nt, Artificial Sequence
  HTT spacer sequence TTCN PAM
gucucuuguccucaguagag

SEQ ID NO: 36635 - RNA, 20 nt, Artificial Sequence
  HTT spacer sequence TTCN PAM
cugacgucagcgugccccua

SEQ ID NO: 36636 - RNA, 20 nt, Artificial Sequence
  HTT spacer sequence TTCN PAM
acuucccugacgucagcgug

SEQ ID NO: 36637 - RNA, 20 nt, Artificial Sequence
  HTT spacer sequence TTCN PAM
cuuggguuucaacuucccug

SEQ ID NO: 36638 - RNA, 20 nt, Artificial Sequence
  HTT spacer sequence TTCN PAM
cccugcagggcagccugccu

SEQ ID NO: 36639 - RNA, 20 nt, Artificial Sequence
  HTT spacer sequence TTCN PAM
cucauaaauuguuuggaagc

SEQ ID NO: 36640 - RNA, 20 nt, Artificial Sequence
  HTT spacer sequence TTCN PAM
aaacaauuuaugagggaaga

SEQ ID NO: 36641 - RNA, 20 nt, Artificial Sequence
  HTT spacer sequence TTCN PAM
gagcauucacugaguuagag

SEQ ID NO: 36642 - RNA, 20 nt, Artificial Sequence
  HTT spacer sequence TTCN PAM
cugaguuagagcugcuucug

SEQ ID NO: 36643 - RNA, 20 nt, Artificial Sequence
  HTT spacer sequence TTCN PAM
gcaaaugugcugcuucugcu

SEQ ID NO: 36644 - RNA, 20 nt, Artificial Sequence
  HTT spacer sequence TTCN PAM
gcuaaguggcugugacuuca

SEQ ID NO: 36645 - RNA, 20 nt, Artificial Sequence
  HTT spacer sequence TTCN PAM
ugcagccuucacuugguuug

SEQ ID NO: 36646 - RNA, 20 nt, Artificial Sequence
  HTT spacer sequence TTCN PAM
cuugguuugucaucagugga

SEQ ID NO: 36647 - RNA, 20 nt, Artificial Sequence
  HTT spacer sequence TTCN PAM
acaacacagggcaucuccac

SEQ ID NO: 36648 - RNA, 20 nt, Artificial Sequence
  HTT spacer sequence TTCN PAM
gcaggcagcccauggcuuuc

SEQ ID NO: 36649 - RNA, 20 nt, Artificial Sequence
  HTT spacer sequence TTCN PAM
cugugucgcauugaagcagc

SEQ ID NO: 36650 - RNA, 20 nt, Artificial Sequence
  HTT spacer sequence TTCN PAM
augcgacacagggaaagcca

SEQ ID NO: 36651 - RNA, 20 nt, Artificial Sequence
  HTT spacer sequence TTCN PAM
ugugacagaugaucagcuug

SEQ ID NO: 36652 - RNA, 20 nt, Artificial Sequence
  HTT spacer sequence TTCN PAM
caaagcuuaaaaaaaugcua

SEQ ID NO: 36653 - RNA, 20 nt, Artificial Sequence
  HTT spacer sequence TTCN PAM
uccucagugaggaaggugau

SEQ ID NO: 36654 - RNA, 20 nt, Artificial Sequence
  HTT spacer sequence TTCN PAM
ucacugaggaugaaauggca

SEQ ID NO: 36655 - RNA, 20 nt, Artificial Sequence
  HTT spacer sequence TTCN PAM
cuuuagcgguuaauguacuc

SEQ ID NO: 36656 - RNA, 20 nt, Artificial Sequence
  HTT spacer sequence TTCN PAM
uguauacuuggcguaagugc

SEQ ID NO: 36657 - RNA, 20 nt, Artificial Sequence
  HTT spacer sequence TTCN PAM
cugucaucuuuuuuguuucu

SEQ ID NO: 36658 - RNA, 20 nt, Artificial Sequence
  HTT spacer sequence TTCN PAM
uggaagguuucuauuacaac

SEQ ID NO: 36659 - RNA, 20 nt, Artificial Sequence
  HTT spacer sequence TTCN PAM
aagaaacaaaaaagaugaca

SEQ ID NO: 36660 - RNA, 20 nt, Artificial Sequence
  HTT spacer sequence TTCN PAM
auuacaacugguugguauuc

SEQ ID NO: 36661 - RNA, 20 nt, Artificial Sequence
  HTT spacer sequence TTCN PAM
uuuagaagacauuguuacaa

SEQ ID NO: 36662 - RNA, 20 nt, Artificial Sequence
  HTT spacer sequence TTCN PAM
aaaagaauaccaaccaguug

SEQ ID NO: 36663 - RNA, 20 nt, Artificial Sequence
  HTT spacer sequence TTCN PAM
gcuguuuuguaacaaugucu

SEQ ID NO: 36664 - RNA, 20 nt, Artificial Sequence
  HTT spacer sequence TTCN PAM
accuucagcuguuuuguaac

SEQ ID NO: 36665 - RNA, 20 nt, Artificial Sequence
  HTT spacer sequence TTCN PAM
auugccaggaacuaggcaca

SEQ ID NO: 36666 - RNA, 20 nt, Artificial Sequence
  HTT spacer sequence TTCN PAM
uggcaauagaaaguauguug

SEQ ID NO: 36667 - RNA, 20 nt, Artificial Sequence
  HTT spacer sequence TTCN PAM
agucugguaggugaaucaca

SEQ ID NO: 36668 - RNA, 20 nt, Artificial Sequence
  HTT spacer sequence TTCN PAM
ccuaccagacuugaagaugu

SEQ ID NO: 36669 - RNA, 20 nt, Artificial Sequence
  HTT spacer sequence TTCN PAM
uggagugucucguuccccau

SEQ ID NO: 36670 - RNA, 20 nt, Artificial Sequence
  HTT spacer sequence TTCN PAM
ccauucugcacuauacacuc

SEQ ID NO: 36671 - RNA, 20 nt, Artificial Sequence
  HTT spacer sequence TTCN PAM
gcacuauacacucucagagu

SEQ ID NO: 36672 - RNA, 20 nt, Artificial Sequence
  HTT spacer sequence TTCN PAM
accgggcagcacagcuccua

SEQ ID NO: 36673 - RNA, 20 nt, Artificial Sequence
  HTT spacer sequence TTCN PAM
acuggcacacugggcaaggc

SEQ ID NO: 36674 - RNA, 20 nt, Artificial Sequence
  HTT spacer sequence TTCN PAM
acucuuggguauauacccaa

SEQ ID NO: 36675 - RNA, 20 nt, Artificial Sequence
  HTT spacer sequence TTCN PAM
uuuggguauauacccaagag

SEQ ID NO: 36676 - RNA, 20 nt, Artificial Sequence
  HTT spacer sequence TTCN PAM
auucuuuuggguauauaccc

SEQ ID NO: 36677 - RNA, 20 nt, Artificial Sequence
  HTT spacer sequence TTCN PAM
ccacccugcuuuccauucuu

SEQ ID NO: 36678 - RNA, 20 nt, Artificial Sequence
  HTT spacer sequence TTCN PAM
uagcagcauuauucacgaua

SEQ ID NO: 36679 - RNA, 20 nt, Artificial Sequence
  HTT spacer sequence TTCN PAM
cgauagcuaaaauguggaac

SEQ ID NO: 36680 - RNA, 20 nt, Artificial Sequence
  HTT spacer sequence TTCN PAM
acauuuuagcuaucgugaau

SEQ ID NO: 36681 - RNA, 20 nt, Artificial Sequence
  HTT spacer sequence TTCN PAM
guugguuccacauuuuagcu

SEQ ID NO: 36682 - RNA, 20 nt, Artificial Sequence
  HTT spacer sequence TTCN PAM
uccaucgagggacacuucag

SEQ ID NO: 36683 - RNA, 20 nt, Artificial Sequence
  HTT spacer sequence TTCN PAM
acuguaaauauacaccagau

SEQ ID NO: 36684 - RNA, 20 nt, Artificial Sequence
  HTT spacer sequence TTCN PAM
gccuuaaaaaaaggacauuc

SEQ ID NO: 36685 - RNA, 20 nt, Artificial Sequence
  HTT spacer sequence TTCN PAM
gacacaugcuacaacauggg

SEQ ID NO: 36686 - RNA, 20 nt, Artificial Sequence
  HTT spacer sequence TTCN PAM
uuuagcauaauguccuuaag

SEQ ID NO: 36687 - RNA, 20 nt, Artificial Sequence
  HTT spacer sequence TTCN PAM
acuuacaugagggaccugga

SEQ ID NO: 36688 - RNA, 20 nt, Artificial Sequence
  HTT spacer sequence TTCN PAM
uagauauagaaaguagaaug

SEQ ID NO: 36689 - RNA, 20 nt, Artificial Sequence
  HTT spacer sequence TTCN PAM
auaucuaugaauuaacuacu

SEQ ID NO: 36690 - RNA, 20 nt, Artificial Sequence
  HTT spacer sequence TTCN PAM
acuuucuauaucuaugaauu

SEQ ID NO: 36691 - RNA, 20 nt, Artificial Sequence
  HTT spacer sequence TTCN PAM
ucuuguaaaaauaacucccc

SEQ ID NO: 36692 - RNA, 20 nt, Artificial Sequence
  HTT spacer sequence TTCN PAM
agaaaugaaugguggugaug

SEQ ID NO: 36693 - RNA, 20 nt, Artificial Sequence
  HTT spacer sequence TTCN PAM
agaauaacucucuucaucuu

SEQ ID NO: 36694 - RNA, 20 nt, Artificial Sequence
  HTT spacer sequence TTCN PAM
uuucuagaauaacucucuuc

SEQ ID NO: 36695 - RNA, 20 nt, Artificial Sequence
  HTT spacer sequence TTCN PAM
uaauguuauacaaccaucac

SEQ ID NO: 36696 - RNA, 20 nt, Artificial Sequence
  HTT spacer sequence TTCN PAM
guagcauuaaguacauucau

SEQ ID NO: 36697 - RNA, 20 nt, Artificial Sequence
  HTT spacer sequence TTCN PAM
ggcaugagccaugacaccug

SEQ ID NO: 36698 - RNA, 20 nt, Artificial Sequence
  HTT spacer sequence TTCN PAM
ugccacugcacuccagccuc

SEQ ID NO: 36699 - RNA, 20 nt, Artificial Sequence
  HTT spacer sequence TTCN PAM
agugauccuuuuaccuugac

SEQ ID NO: 36700 - RNA, 20 nt, Artificial Sequence
  HTT spacer sequence TTCN PAM
uuguagagauaggggucucg

SEQ ID NO: 36701 - RNA, 20 nt, Artificial Sequence
  HTT spacer sequence TTCN PAM
aggcugcagggagcuauuau

SEQ ID NO: 36702 - RNA, 20 nt, Artificial Sequence
  HTT spacer sequence TTCN PAM
guagcccaggcuggagugca

SEQ ID NO: 36703 - RNA, 20 nt, Artificial Sequence
  HTT spacer sequence TTCN PAM
uccuccuguguuaaauuugg

SEQ ID NO: 36704 - RNA, 20 nt, Artificial Sequence
  HTT spacer sequence TTCN PAM
ccguccuugaucauuuguaa

SEQ ID NO: 36705 - RNA, 20 nt, Artificial Sequence
  HTT spacer sequence TTCN PAM
ggugugagcuaccaugccca

SEQ ID NO: 36706 - RNA, 20 nt, Artificial Sequence
  HTT spacer sequence TTCN PAM
cuagagacauggucucgauc

SEQ ID NO: 36707 - RNA, 20 nt, Artificial Sequence
  HTT spacer sequence TTCN PAM
uucucuagagacauggucuc

SEQ ID NO: 36708 - RNA, 20 nt, Artificial Sequence
  HTT spacer sequence TTCN PAM
cuguccuugucauuuucuuu

SEQ ID NO: 36709 - RNA, 20 nt, Artificial Sequence
  HTT spacer sequence TTCN PAM
uggguucacuguccuuguca

SEQ ID NO: 36710 - RNA, 20 nt, Artificial Sequence
  HTT spacer sequence TTCN PAM
augcuugcugcacagcuggc

SEQ ID NO: 36711 - RNA, 20 nt, Artificial Sequence
  HTT spacer sequence TTCN PAM
aagaagaacgaucguuugua

SEQ ID NO: 36712 - RNA, 20 nt, Artificial Sequence
  HTT spacer sequence TTCN PAM
uggaaaacacacuguccuaa

SEQ ID NO: 36713 - RNA, 20 nt, Artificial Sequence
  HTT spacer sequence TTCN PAM
ucuuggaaaacacacugucc

SEQ ID NO: 36714 - RNA, 20 nt, Artificial Sequence
  HTT spacer sequence TTCN PAM
cauuacaaacgaucguucuu

SEQ ID NO: 36715 - RNA, 20 nt, Artificial Sequence
  HTT spacer sequence TTCN PAM
agcuauuuagucauuuauuu

SEQ ID NO: 36716 - RNA, 20 nt, Artificial Sequence
  HTT spacer sequence TTCN PAM
aggggauaggcacgucuuuc

SEQ ID NO: 36717 - RNA, 20 nt, Artificial Sequence
  HTT spacer sequence TTCN PAM
ucucucaagaaaauagaaag

SEQ ID NO: 36718 - RNA, 20 nt, Artificial Sequence
  HTT spacer sequence TTCN PAM
cucaagaaaauagaaaggca

SEQ ID NO: 36719 - RNA, 20 nt, Artificial Sequence
  HTT spacer sequence TTCN PAM
ugagagaagaaagacgugcc

SEQ ID NO: 36720 - RNA, 20 nt, Artificial Sequence
  HTT spacer sequence TTCN PAM
auuuucuugagagaagaaag

SEQ ID NO: 36721 - RNA, 20 nt, Artificial Sequence
  HTT spacer sequence TTCN PAM
aauuucuaguaacagcaaac

SEQ ID NO: 36722 - RNA, 20 nt, Artificial Sequence
  HTT spacer sequence TTCN PAM
aguaacagcaaacagcauua

SEQ ID NO: 36723 - RNA, 20 nt, Artificial Sequence
  HTT spacer sequence TTCN PAM
gcaguugaucuguuggaagc

SEQ ID NO: 36724 - RNA, 20 nt, Artificial Sequence
  HTT spacer sequence TTCN PAM
aacagaucaacugcugaaca

SEQ ID NO: 36725 - RNA, 20 nt, Artificial Sequence
  HTT spacer sequence TTCN PAM
ccuuuaagcggcuuaggagu

SEQ ID NO: 36726 - RNA, 20 nt, Artificial Sequence
  HTT spacer sequence TTCN PAM
auaggucuuugaucgugacu

SEQ ID NO: 36727 - RNA, 20 nt, Artificial Sequence
  HTT spacer sequence TTCN PAM
aggauccuuggcucucuugg

SEQ ID NO: 36728 - RNA, 20 nt, Artificial Sequence
  HTT spacer sequence TTCN PAM
caagagagccaaggauccua

SEQ ID NO: 36729 - RNA, 20 nt, Artificial Sequence
  HTT spacer sequence TTCN PAM
gauagucauaauguaaauac

SEQ ID NO: 36730 - RNA, 20 nt, Artificial Sequence
  HTT spacer sequence TTCN PAM
uucuuucuuucuuucuuucu

SEQ ID NO: 36731 - RNA, 20 nt, Artificial Sequence
  HTT spacer sequence TTCN PAM
uucuuucuuucuuucuuuuu

SEQ ID NO: 36732 - RNA, 20 nt, Artificial Sequence
  HTT spacer sequence TTCN PAM
uucuuucuuucuuuuuuuuu

SEQ ID NO: 36733 - RNA, 20 nt, Artificial Sequence
  HTT spacer sequence TTCN PAM
uucuuucuuuuuuuuuuuga

SEQ ID NO: 36734 - RNA, 20 nt, Artificial Sequence
  HTT spacer sequence TTCN PAM
uucuuuuuuuuuuugagaca

SEQ ID NO: 36735 - RNA, 20 nt, Artificial Sequence
  HTT spacer sequence TTCN PAM
uuuuuuuuuugagacagagu

SEQ ID NO: 36736 - RNA, 20 nt, Artificial Sequence
  HTT spacer sequence TTCN PAM
cucuuguugcccauccugga

SEQ ID NO: 36737 - RNA, 20 nt, Artificial Sequence
  HTT spacer sequence TTCN PAM
agcaauucuccugccucagc

SEQ ID NO: 36738 - RNA, 20 nt, Artificial Sequence
  HTT spacer sequence TTCN PAM
ccugccucagccucccgagu

SEQ ID NO: 36739 - RNA, 20 nt, Artificial Sequence
  HTT spacer sequence TTCN PAM
ccauguugaggcuggucucg

SEQ ID NO: 36740 - RNA, 20 nt, Artificial Sequence
  HTT spacer sequence TTCN PAM
agaccagccucaacauggag

SEQ ID NO: 36741 - RNA, 20 nt, Artificial Sequence
  HTT spacer sequence TTCN PAM
uuuuugaaaucaauguauga

SEQ ID NO: 36742 - RNA, 20 nt, Artificial Sequence
  HTT spacer sequence TTCN PAM
aaaaugaaagcucgggccgg

SEQ ID NO: 36743 - RNA, 20 nt, Artificial Sequence
  HTT spacer sequence TTCN PAM
gucauacauugauuucaaaa

SEQ ID NO: 36744 - RNA, 20 nt, Artificial Sequence
  HTT spacer sequence TTCN PAM
guguuucagucauacauuga

SEQ ID NO: 36745 - RNA, 20 nt, Artificial Sequence
  HTT spacer sequence TTCN PAM
gaacagaaugaaaaugucuu

SEQ ID NO: 36746 - RNA, 20 nt, Artificial Sequence
  HTT spacer sequence TTCN PAM
gaaaccauaauuaagucagu

SEQ ID NO: 36747 - RNA, 20 nt, Artificial Sequence
  HTT spacer sequence TTCN PAM
guucugaaaccauaauuaag

SEQ ID NO: 36748 - RNA, 20 nt, Artificial Sequence
  HTT spacer sequence TTCN PAM
uucuguucugaaaccauaau

SEQ ID NO: 36749 - RNA, 20 nt, Artificial Sequence
  HTT spacer sequence TTCN PAM
guucugaugaauauaaaagg

SEQ ID NO: 36750 - RNA, 20 nt, Artificial Sequence
  HTT spacer sequence TTCN PAM
gaugaauauaaaaggaaaac

SEQ ID NO: 36751 - RNA, 20 nt, Artificial Sequence
  HTT spacer sequence TTCN PAM
ucagaaccgaagacauuuuc

SEQ ID NO: 36752 - RNA, 20 nt, Artificial Sequence
  HTT spacer sequence TTCN PAM
uuuuauauucaucagaaccg

SEQ ID NO: 36753 - RNA, 20 nt, Artificial Sequence
  HTT spacer sequence TTCN PAM
acuccccaccucuaucucua

SEQ ID NO: 36754 - RNA, 20 nt, Artificial Sequence
  HTT spacer sequence TTCN PAM
ccuuccacuccccaccucua

SEQ ID NO: 36755 - RNA, 20 nt, Artificial Sequence
  HTT spacer sequence TTCN PAM
ccuagcauuguugggauuau

SEQ ID NO: 36756 - RNA, 20 nt, Artificial Sequence
  HTT spacer sequence TTCN PAM
gaugauguaaccauauaauc

SEQ ID NO: 36757 - RNA, 20 nt, Artificial Sequence
  HTT spacer sequence TTCN PAM
gaggucuccaaauagaacua

SEQ ID NO: 36758 - RNA, 20 nt, Artificial Sequence
  HTT spacer sequence TTCN PAM
auuuggagaccucugaagcc

SEQ ID NO: 36759 - RNA, 20 nt, Artificial Sequence
  HTT spacer sequence TTCN PAM
gauuguuaggagguaguaua

SEQ ID NO: 36760 - RNA, 20 nt, Artificial Sequence
  HTT spacer sequence TTCN PAM
gacaacuuuagacaucaccc

SEQ ID NO: 36761 - RNA, 20 nt, Artificial Sequence
  HTT spacer sequence TTCN PAM
acagucuuucaguugcaggg

SEQ ID NO: 36762 - RNA, 20 nt, Artificial Sequence
  HTT spacer sequence TTCN PAM
guugcagggauaaaacccca

SEQ ID NO: 36763 - RNA, 20 nt, Artificial Sequence
  HTT spacer sequence TTCN PAM
cuuacucuaguuuaaacugg

SEQ ID NO: 36764 - RNA, 20 nt, Artificial Sequence
  HTT spacer sequence TTCN PAM
uucucuuacucuaguuuaaa

SEQ ID NO: 36765 - RNA, 20 nt, Artificial Sequence
  HTT spacer sequence TTCN PAM
aggagcuuaaaccaacacau

SEQ ID NO: 36766 - RNA, 20 nt, Artificial Sequence
  HTT spacer sequence TTCN PAM
guggucugcauuguauauuu

SEQ ID NO: 36767 - RNA, 20 nt, Artificial Sequence
  HTT spacer sequence TTCN PAM
ucuuuucauuuauauaauuu

SEQ ID NO: 36768 - RNA, 20 nt, Artificial Sequence
  HTT spacer sequence TTCN PAM
uuucauuuauauaauuuuua

SEQ ID NO: 36769 - RNA, 20 nt, Artificial Sequence
  HTT spacer sequence TTCN PAM
uuuauauaauuuuuaaauuu

SEQ ID NO: 36770 - RNA, 20 nt, Artificial Sequence
  HTT spacer sequence TTCN PAM
gccuaggcgacaaagugaga

SEQ ID NO: 36771 - RNA, 20 nt, Artificial Sequence
  HTT spacer sequence TTCN PAM
ugccacugcacuucagccua

SEQ ID NO: 36772 - RNA, 20 nt, Artificial Sequence
  HTT spacer sequence TTCN PAM
aggcuagagugagccucgca

SEQ ID NO: 36773 - RNA, 20 nt, Artificial Sequence
  HTT spacer sequence TTCN PAM
uccugccucagccuucuaag

SEQ ID NO: 36774 - RNA, 20 nt, Artificial Sequence
  HTT spacer sequence TTCN PAM
ugccucagccuucuaaguag

SEQ ID NO: 36775 - RNA, 20 nt, Artificial Sequence
  HTT spacer sequence TTCN PAM
aaguagcugagacaauaggc

SEQ ID NO: 36776 - RNA, 20 nt, Artificial Sequence
  HTT spacer sequence TTCN PAM
acaaaaaaauuuuaaaaccu

SEQ ID NO: 36777 - RNA, 20 nt, Artificial Sequence
  HTT spacer sequence TTCN PAM
auuucuacaaaaaaauuuua

SEQ ID NO: 36778 - RNA, 20 nt, Artificial Sequence
  HTT spacer sequence TTCN PAM
ggcgauccuccugccucugc

SEQ ID NO: 36779 - RNA, 20 nt, Artificial Sequence
  HTT spacer sequence TTCN PAM
uguguuaguuuuguucucug

SEQ ID NO: 36780 - RNA, 20 nt, Artificial Sequence
  HTT spacer sequence TTCN PAM
cuggugggcuguuuucacau

SEQ ID NO: 36781 - RNA, 20 nt, Artificial Sequence
  HTT spacer sequence TTCN PAM
caugaccgaagaugaccucu

SEQ ID NO: 36782 - RNA, 20 nt, Artificial Sequence
  HTT spacer sequence TTCN PAM
gucaugugaaaacagcccac

SEQ ID NO: 36783 - RNA, 20 nt, Artificial Sequence
  HTT spacer sequence TTCN PAM
cagccccucaaguaggccua

SEQ ID NO: 36784 - RNA, 20 nt, Artificial Sequence
  HTT spacer sequence TTCN PAM
gggguuuauggucacccaua

SEQ ID NO: 36785 - RNA, 20 nt, Artificial Sequence
  HTT spacer sequence TTCN PAM
auugaugaggagguggggcu

SEQ ID NO: 36786 - RNA, 20 nt, Artificial Sequence
  HTT spacer sequence TTCN PAM
aacugcugugcugcuauccc

SEQ ID NO: 36787 - RNA, 20 nt, Artificial Sequence
  HTT spacer sequence TTCN PAM
gguaguuaccuccaaaauuc

SEQ ID NO: 36788 - RNA, 20 nt, Artificial Sequence
  HTT spacer sequence TTCN PAM
guucugguaguuaccuccaa

SEQ ID NO: 36789 - RNA, 20 nt, Artificial Sequence
  HTT spacer sequence TTCN PAM
guuuucaguucugguaguua

SEQ ID NO: 36790 - RNA, 20 nt, Artificial Sequence
  HTT spacer sequence TTCN PAM
cuuacuggauuuuuguacac

SEQ ID NO: 36791 - RNA, 20 nt, Artificial Sequence
  HTT spacer sequence TTCN PAM
gccuugguccauuugaggau

SEQ ID NO: 36792 - RNA, 20 nt, Artificial Sequence
  HTT spacer sequence TTCN PAM
guugagcauccuggcucuug

SEQ ID NO: 36793 - RNA, 20 nt, Artificial Sequence
  HTT spacer sequence TTCN PAM
gugcaggcaagagccaggau

SEQ ID NO: 36794 - RNA, 20 nt, Artificial Sequence
  HTT spacer sequence TTCN PAM
agucagugcgucaguaucac

SEQ ID NO: 36795 - RNA, 20 nt, Artificial Sequence
  HTT spacer sequence TTCN PAM
uaugaagaagaacaguagug

SEQ ID NO: 36796 - RNA, 20 nt, Artificial Sequence
  HTT spacer sequence TTCN PAM
uaggaaauaucaagacuugu

SEQ ID NO: 36797 - RNA, 20 nt, Artificial Sequence
  HTT spacer sequence TTCN PAM
ucauaggaaauaucaagacu

SEQ ID NO: 36798 - RNA, 20 nt, Artificial Sequence
  HTT spacer sequence TTCN PAM
ucuucauaggaaauaucaag

SEQ ID NO: 36799 - RNA, 20 nt, Artificial Sequence
  HTT spacer sequence TTCN PAM
ucugucacugcacuacuguu

SEQ ID NO: 36800 - RNA, 20 nt, Artificial Sequence
  HTT spacer sequence TTCN PAM
gagggagagaaguagcuagc

SEQ ID NO: 36801 - RNA, 20 nt, Artificial Sequence
  HTT spacer sequence TTCN PAM
cucccucagaaauccugccu

SEQ ID NO: 36802 - RNA, 20 nt, Artificial Sequence
  HTT spacer sequence TTCN PAM
cugcaaaaagcuagcuacuu

SEQ ID NO: 36803 - RNA, 20 nt, Artificial Sequence
  HTT spacer sequence TTCN PAM
ggcacccaagagagcagcug

SEQ ID NO: 36804 - RNA, 20 nt, Artificial Sequence
  HTT spacer sequence TTCN PAM
guggcgccgugcggccgggc

SEQ ID NO: 36805 - RNA, 20 nt, Artificial Sequence
  HTT spacer sequence TTCN PAM
ccaggauucuguggcgccgu

SEQ ID NO: 36806 - RNA, 20 nt, Artificial Sequence
  HTT spacer sequence TTCN PAM
uggccucugcauucagcugc

SEQ ID NO: 36807 - RNA, 20 nt, Artificial Sequence
  HTT spacer sequence TTCN PAM
gcugcugucacccuccgcac

SEQ ID NO: 36808 - RNA, 20 nt, Artificial Sequence
  HTT spacer sequence TTCN PAM
uaguggacucuaguuuuuga

SEQ ID NO: 36809 - RNA, 20 nt, Artificial Sequence
  HTT spacer sequence TTCN PAM
auaauagcaaguaaggcuca

SEQ ID NO: 36810 - RNA, 20 nt, Artificial Sequence
  HTT spacer sequence TTCN PAM
uguuucuuuuuaaagaucuu

SEQ ID NO: 36811 - RNA, 20 nt, Artificial Sequence
  HTT spacer sequence TTCN PAM
uuuuaaagaucuucggauua

SEQ ID NO: 36812 - RNA, 20 nt, Artificial Sequence
  HTT spacer sequence TTCN PAM
gauuaugcuucacugaccac

SEQ ID NO: 36813 - RNA, 20 nt, Artificial Sequence
  HTT spacer sequence TTCN PAM
cugaccacuguaauaaguuu

SEQ ID NO: 36814 - RNA, 20 nt, Artificial Sequence
  HTT spacer sequence TTCN PAM
caacuuuaaacuuauuacag

SEQ ID NO: 36815 - RNA, 20 nt, Artificial Sequence
  HTT spacer sequence TTCN PAM
uuaacaagccauauuuucuc

SEQ ID NO: 36816 - RNA, 20 nt, Artificial Sequence
  HTT spacer sequence TTCN PAM
aaggacuagucuugccuuug

SEQ ID NO: 36817 - RNA, 20 nt, Artificial Sequence
  HTT spacer sequence TTCN PAM
guguccuucuacauguccga

SEQ ID NO: 36818 - RNA, 20 nt, Artificial Sequence
  HTT spacer sequence TTCN PAM
acauguccgagcgaucucug

SEQ ID NO: 36819 - RNA, 20 nt, Artificial Sequence
  HTT spacer sequence TTCN PAM
ucuccuuccaucucacaauu

SEQ ID NO: 36820 - RNA, 20 nt, Artificial Sequence
  HTT spacer sequence TTCN PAM
aucucacaauugaggcaaaa

SEQ ID NO: 36821 - RNA, 20 nt, Artificial Sequence
  HTT spacer sequence TTCN PAM
acaguaacaauauuuugccu

SEQ ID NO: 36822 - RNA, 20 nt, Artificial Sequence
  HTT spacer sequence TTCN PAM
agcagagacaggaugucugc

SEQ ID NO: 36823 - RNA, 20 nt, Artificial Sequence
  HTT spacer sequence TTCN PAM
guaccugaaauguggcuggu

SEQ ID NO: 36824 - RNA, 20 nt, Artificial Sequence
  HTT spacer sequence TTCN PAM
gguacagaacaccacaugug

SEQ ID NO: 36825 - RNA, 20 nt, Artificial Sequence
  HTT spacer sequence TTCN PAM
caacagaccugcacugucuc

SEQ ID NO: 36826 - RNA, 20 nt, Artificial Sequence
  HTT spacer sequence TTCN PAM
ugcugguaucuuuugaccuu

SEQ ID NO: 36827 - RNA, 20 nt, Artificial Sequence
  HTT spacer sequence TTCN PAM
gucuucuuguuuccuuugac

SEQ ID NO: 36828 - RNA, 20 nt, Artificial Sequence
  HTT spacer sequence TTCN PAM
uguuuccuuugacugcauuu

SEQ ID NO: 36829 - RNA, 20 nt, Artificial Sequence
  HTT spacer sequence TTCN PAM
uuugacugcauuuauuugaa

SEQ ID NO: 36830 - RNA, 20 nt, Artificial Sequence
  HTT spacer sequence TTCN PAM
aauaaaugcagucaaaggaa

SEQ ID NO: 36831 - RNA, 20 nt, Artificial Sequence
  HTT spacer sequence TTCN PAM
gccaccuagugucuuucaaa

SEQ ID NO: 36832 - RNA, 20 nt, Artificial Sequence
  HTT spacer sequence TTCN PAM
agauaagaguugaaauaauu

SEQ ID NO: 36833 - RNA, 20 nt, Artificial Sequence
  HTT spacer sequence TTCN PAM
acucuuaucuugaaaccaau

SEQ ID NO: 36834 - RNA, 20 nt, Artificial Sequence
  HTT spacer sequence TTCN PAM
ucucguguuuuuauauaagu

SEQ ID NO: 36835 - RNA, 20 nt, Artificial Sequence
  HTT spacer sequence TTCN PAM
cguacugcuuaaacaaaggc

SEQ ID NO: 36836 - RNA, 20 nt, Artificial Sequence
  HTT spacer sequence TTCN PAM
uagccuuuguuuaagcagua

SEQ ID NO: 36837 - RNA, 20 nt, Artificial Sequence
  HTT spacer sequence TTCN PAM
acccauaaaccgaaaaugaa

SEQ ID NO: 36838 - RNA, 20 nt, Artificial Sequence
  HTT spacer sequence TTCN PAM
guuuauggguggaauucaua

SEQ ID NO: 36839 - RNA, 20 nt, Artificial Sequence
  HTT spacer sequence TTCN PAM
uuuucgguuuauggguggaa

SEQ ID NO: 36840 - RNA, 20 nt, Artificial Sequence
  HTT spacer sequence TTCN PAM
ggcguggguacuucuuaaau

SEQ ID NO: 36841 - RNA, 20 nt, Artificial Sequence
  HTT spacer sequence TTCN PAM
uaaauaauaccugguucagg

SEQ ID NO: 36842 - RNA, 20 nt, Artificial Sequence
  HTT spacer sequence TTCN PAM
ggaacuagucagaauggcac

SEQ ID NO: 36843 - RNA, 20 nt, Artificial Sequence
  HTT spacer sequence TTCN PAM
ugaaccagguauuauuuaag

SEQ ID NO: 36844 - RNA, 20 nt, Artificial Sequence
  HTT spacer sequence TTCN PAM
gacuaguuccugaaccaggu

SEQ ID NO: 36845 - RNA, 20 nt, Artificial Sequence
  HTT spacer sequence TTCN PAM
ugcuuuuccucuuguuggga

SEQ ID NO: 36846 - RNA, 20 nt, Artificial Sequence
  HTT spacer sequence TTCN PAM
ucuuguugggagaggagggu

SEQ ID NO: 36847 - RNA, 20 nt, Artificial Sequence
  HTT spacer sequence TTCN PAM
ucccaaagugguuugccuau

SEQ ID NO: 36848 - RNA, 20 nt, Artificial Sequence
  HTT spacer sequence TTCN PAM
cauuccaucuaggauaagca

SEQ ID NO: 36849 - RNA, 20 nt, Artificial Sequence
  HTT spacer sequence TTCN PAM
aucuaggauaagcagaauag

SEQ ID NO: 36850 - RNA, 20 nt, Artificial Sequence
  HTT spacer sequence TTCN PAM
gcuuauccuagauggaaugu

SEQ ID NO: 36851 - RNA, 20 nt, Artificial Sequence
  HTT spacer sequence TTCN PAM
uggcuauucugcuuauccua

SEQ ID NO: 36852 - RNA, 20 nt, Artificial Sequence
  HTT spacer sequence TTCN PAM
aaaccagucuaucuuggacc

SEQ ID NO: 36853 - RNA, 20 nt, Artificial Sequence
  HTT spacer sequence TTCN PAM
accuccugggccucuggugc

SEQ ID NO: 36854 - RNA, 20 nt, Artificial Sequence
  HTT spacer sequence TTCN PAM
gccacauggacaacaaacaa

SEQ ID NO: 36855 - RNA, 20 nt, Artificial Sequence
  HTT spacer sequence TTCN PAM
agcuuugcucaccgugauuu

SEQ ID NO: 36856 - RNA, 20 nt, Artificial Sequence
  HTT spacer sequence TTCN PAM
aggacacaucuugugcucuu

SEQ ID NO: 36857 - RNA, 20 nt, Artificial Sequence
  HTT spacer sequence TTCN PAM
cugccugccauccagacuau

SEQ ID NO: 36858 - RNA, 20 nt, Artificial Sequence
  HTT spacer sequence TTCN PAM
ucccugaguccuggucgugg

SEQ ID NO: 36859 - RNA, 20 nt, Artificial Sequence
  HTT spacer sequence TTCN PAM
ucuguggcagaggggauggc

SEQ ID NO: 36860 - RNA, 20 nt, Artificial Sequence
  HTT spacer sequence TTCN PAM
cuguccuuuccaaagcgucu

SEQ ID NO: 36861 - RNA, 20 nt, Artificial Sequence
  HTT spacer sequence TTCN PAM
aaagcgucugugguuccacu

SEQ ID NO: 36862 - RNA, 20 nt, Artificial Sequence
  HTT spacer sequence TTCN PAM
acuuuuuggggcaaagcagg

SEQ ID NO: 36863 - RNA, 20 nt, Artificial Sequence
  HTT spacer sequence TTCN PAM
ugcuuugccccaaaaagugg

SEQ ID NO: 36864 - RNA, 20 nt, Artificial Sequence
  HTT spacer sequence TTCN PAM
aguauuccugcuuugcccca

SEQ ID NO: 36865 - RNA, 20 nt, Artificial Sequence
  HTT spacer sequence TTCN PAM
cucucuuccaguauuccugc

SEQ ID NO: 36866 - RNA, 20 nt, Artificial Sequence
  HTT spacer sequence TTCN PAM
auaguaauaaaguugacauu

SEQ ID NO: 36867 - RNA, 20 nt, Artificial Sequence
  HTT spacer sequence TTCN PAM
aguucaugcuuggggaaagg

SEQ ID NO: 36868 - RNA, 20 nt, Artificial Sequence
  HTT spacer sequence TTCN PAM
ugcuuggggaaaggacaggg

SEQ ID NO: 36869 - RNA, 20 nt, Artificial Sequence
  HTT spacer sequence TTCN PAM
ccaagcaugaacuugaauca

SEQ ID NO: 36870 - RNA, 20 nt, Artificial Sequence
  HTT spacer sequence TTCN PAM
auugcucccagcauuauaau

SEQ ID NO: 36871 - RNA, 20 nt, Artificial Sequence
  HTT spacer sequence TTCN PAM
cauggguaugugguagguuu

SEQ ID NO: 36872 - RNA, 20 nt, Artificial Sequence
  HTT spacer sequence TTCN PAM
uagaacugcucugugaagua

SEQ ID NO: 36873 - RNA, 20 nt, Artificial Sequence
  HTT spacer sequence TTCN PAM
aagaauuaacugggauaauu

SEQ ID NO: 36874 - RNA, 20 nt, Artificial Sequence
  HTT spacer sequence TTCN PAM
cagagcaguucuaagaauua

SEQ ID NO: 36875 - RNA, 20 nt, Artificial Sequence
  HTT spacer sequence TTCN PAM
cgcuuugugcuuaaguucua

SEQ ID NO: 36876 - RNA, 20 nt, Artificial Sequence
  HTT spacer sequence TTCN PAM
aaaagauccugugccaaaac

SEQ ID NO: 36877 - RNA, 20 nt, Artificial Sequence
  HTT spacer sequence TTCN PAM
ugguuuuggcacaggaucuu

SEQ ID NO: 36878 - RNA, 20 nt, Artificial Sequence
  HTT spacer sequence TTCN PAM
uucuugguuuuggcacagga

SEQ ID NO: 36879 - RNA, 20 nt, Artificial Sequence
  HTT spacer sequence TTCN PAM
uucuugcccaucgaucuuuc

SEQ ID NO: 36880 - RNA, 20 nt, Artificial Sequence
  HTT spacer sequence TTCN PAM
ugcccaucgaucuuucucuc

SEQ ID NO: 36881 - RNA, 20 nt, Artificial Sequence
  HTT spacer sequence TTCN PAM
cucaucaggccacuucuugg

SEQ ID NO: 36882 - RNA, 20 nt, Artificial Sequence
  HTT spacer sequence TTCN PAM
uggguugauaguggugagug

SEQ ID NO: 36883 - RNA, 20 nt, Artificial Sequence
  HTT spacer sequence TTCN PAM
gaauacccaccaugggcccc

SEQ ID NO: 36884 - RNA, 20 nt, Artificial Sequence
  HTT spacer sequence TTCN PAM
gaaaguggcagcggcuacac

SEQ ID NO: 36885 - RNA, 20 nt, Artificial Sequence
  HTT spacer sequence TTCN PAM
ccacgccacacagugacugg

SEQ ID NO: 36886 - RNA, 20 nt, Artificial Sequence
  HTT spacer sequence TTCN PAM
cucugugucauagcugaaca

SEQ ID NO: 36887 - RNA, 20 nt, Artificial Sequence
  HTT spacer sequence TTCN PAM
gcuaugacacagagagaacc

SEQ ID NO: 36888 - RNA, 20 nt, Artificial Sequence
  HTT spacer sequence TTCN PAM
gcccuaggagcucucgaugg

SEQ ID NO: 36889 - RNA, 20 nt, Artificial Sequence
  HTT spacer sequence TTCN PAM
accaucgagagcuccuaggg

SEQ ID NO: 36890 - RNA, 20 nt, Artificial Sequence
  HTT spacer sequence TTCN PAM
aaacaggcaggaugugggau

SEQ ID NO: 36891 - RNA, 20 nt, Artificial Sequence
  HTT spacer sequence TTCN PAM
uuauuuccaauuccugcuuc

SEQ ID NO: 36892 - RNA, 20 nt, Artificial Sequence
  HTT spacer sequence TTCN PAM
aauuccugcuuccauuguuc

SEQ ID NO: 36893 - RNA, 20 nt, Artificial Sequence
  HTT spacer sequence TTCN PAM
ugcuuccauuguuccuuuua

SEQ ID NO: 36894 - RNA, 20 nt, Artificial Sequence
  HTT spacer sequence TTCN PAM
auuguuccuuuuaauauuuc

SEQ ID NO: 36895 - RNA, 20 nt, Artificial Sequence
  HTT spacer sequence TTCN PAM
uuuuaauauuucuuuguuua

SEQ ID NO: 36896 - RNA, 20 nt, Artificial Sequence
  HTT spacer sequence TTCN PAM
uuguuuagcucacaaaaaca

SEQ ID NO: 36897 - RNA, 20 nt, Artificial Sequence
  HTT spacer sequence TTCN PAM
cugggugcagccugcauccg

SEQ ID NO: 36898 - RNA, 20 nt, Artificial Sequence
  HTT spacer sequence TTCN PAM
ugcccgccuccuuuccugca

SEQ ID NO: 36899 - RNA, 20 nt, Artificial Sequence
  HTT spacer sequence TTCN PAM
ugcacugccaucguggucuc

SEQ ID NO: 36900 - RNA, 20 nt, Artificial Sequence
  HTT spacer sequence TTCN PAM
cuuccccugagucccuuugg

SEQ ID NO: 36901 - RNA, 20 nt, Artificial Sequence
  HTT spacer sequence TTCN PAM
ccugagucccuuuggcuccc

SEQ ID NO: 36902 - RNA, 20 nt, Artificial Sequence
  HTT spacer sequence TTCN PAM
uucugucucagacugcugcu

SEQ ID NO: 36903 - RNA, 20 nt, Artificial Sequence
  HTT spacer sequence TTCN PAM
gucucagacugcugcucauc

SEQ ID NO: 36904 - RNA, 20 nt, Artificial Sequence
  HTT spacer sequence TTCN PAM
uagggucccgaguagugaug

SEQ ID NO: 36905 - RNA, 20 nt, Artificial Sequence
  HTT spacer sequence TTCN PAM
accgagaagcaucuucucau

SEQ ID NO: 36906 - RNA, 20 nt, Artificial Sequence
  HTT spacer sequence TTCN PAM
cgguggaaccucccuuccua

SEQ ID NO: 36907 - RNA, 20 nt, Artificial Sequence
  HTT spacer sequence TTCN PAM
caucucagccacguucucag

SEQ ID NO: 36908 - RNA, 20 nt, Artificial Sequence
  HTT spacer sequence TTCN PAM
cagugccacuguugucuuug

SEQ ID NO: 36909 - RNA, 20 nt, Artificial Sequence
  HTT spacer sequence TTCN PAM
auggcuucacaccagagaag

SEQ ID NO: 36910 - RNA, 20 nt, Artificial Sequence
  HTT spacer sequence TTCN PAM
caccagagaagguuguuucu

SEQ ID NO: 36911 - RNA, 20 nt, Artificial Sequence
  HTT spacer sequence TTCN PAM
cuggugugaagccauggaaa

SEQ ID NO: 36912 - RNA, 20 nt, Artificial Sequence
  HTT spacer sequence TTCN PAM
ugguuuuaugacaauguauu

SEQ ID NO: 36913 - RNA, 20 nt, Artificial Sequence
  HTT spacer sequence TTCN PAM
ugguucacggaugguuuucc

SEQ ID NO: 36914 - RNA, 20 nt, Artificial Sequence
  HTT spacer sequence TTCN PAM
cggaugguuuuccuccaugu

SEQ ID NO: 36915 - RNA, 20 nt, Artificial Sequence
  HTT spacer sequence TTCN PAM
uccaugugggaauucgggga

SEQ ID NO: 36916 - RNA, 20 nt, Artificial Sequence
  HTT spacer sequence TTCN PAM
cacauggaggaaaaccaucc

SEQ ID NO: 36917 - RNA, 20 nt, Artificial Sequence
  HTT spacer sequence TTCN PAM
gggacccaggcuccuuuccu

SEQ ID NO: 36918 - RNA, 20 nt, Artificial Sequence
  HTT spacer sequence TTCN PAM
uucuuuugguucuguucucc

SEQ ID NO: 36919 - RNA, 20 nt, Artificial Sequence
  HTT spacer sequence TTCN PAM
uuugguucuguucuccaggc

SEQ ID NO: 36920 - RNA, 20 nt, Artificial Sequence
  HTT spacer sequence TTCN PAM
guucuccaggccuucacauc

SEQ ID NO: 36921 - RNA, 20 nt, Artificial Sequence
  HTT spacer sequence TTCN PAM
ccaggccuucacauccucug

SEQ ID NO: 36922 - RNA, 20 nt, Artificial Sequence
  HTT spacer sequence TTCN PAM
cauccucugugucugguugg

SEQ ID NO: 36923 - RNA, 20 nt, Artificial Sequence
  HTT spacer sequence TTCN PAM
cucuccuuguccccaaccag

SEQ ID NO: 36924 - RNA, 20 nt, Artificial Sequence
  HTT spacer sequence TTCN PAM
uuaccuucccucuccuuguc

SEQ ID NO: 36925 - RNA, 20 nt, Artificial Sequence
  HTT spacer sequence TTCN PAM
cucguggugacaggucacag

SEQ ID NO: 36926 - RNA, 20 nt, Artificial Sequence
  HTT spacer sequence TTCN PAM
cagcagcagcacuguggucu

SEQ ID NO: 36927 - RNA, 20 nt, Artificial Sequence
  HTT spacer sequence TTCN PAM
gugaggauaaaaacagguga

SEQ ID NO: 36928 - RNA, 20 nt, Artificial Sequence
  HTT spacer sequence TTCN PAM
aggaugaggaaagucaggga

SEQ ID NO: 36929 - RNA, 20 nt, Artificial Sequence
  HTT spacer sequence TTCN PAM
ucauccuggaaucaccuguu

SEQ ID NO: 36930 - RNA, 20 nt, Artificial Sequence
  HTT spacer sequence TTCN PAM
cugacuuuccucauccugga

SEQ ID NO: 36931 - RNA, 20 nt, Artificial Sequence
  HTT spacer sequence TTCN PAM
aaggguuucccugacuuucc

SEQ ID NO: 36932 - RNA, 20 nt, Artificial Sequence
  HTT spacer sequence TTCN PAM
gaaugagcugcagcgagugc

SEQ ID NO: 36933 - RNA, 20 nt, Artificial Sequence
  HTT spacer sequence TTCN PAM
gaagccaccacuaaucccau

SEQ ID NO: 36934 - RNA, 20 nt, Artificial Sequence
  HTT spacer sequence TTCN PAM
aaagcuuuugcuauucugau

SEQ ID NO: 36935 - RNA, 20 nt, Artificial Sequence
  HTT spacer sequence TTCN PAM
gauaugcccacaccaugccc

SEQ ID NO: 36936 - RNA, 20 nt, Artificial Sequence
  HTT spacer sequence TTCN PAM
ucacucucucugcggagagc

SEQ ID NO: 36937 - RNA, 20 nt, Artificial Sequence
  HTT spacer sequence TTCN PAM
caugagccucuguccaguug

SEQ ID NO: 36938 - RNA, 20 nt, Artificial Sequence
  HTT spacer sequence TTCN PAM
ucccuccaccuggaagggac

SEQ ID NO: 36939 - RNA, 20 nt, Artificial Sequence
  HTT spacer sequence TTCN PAM
agguggagggaggaacaacu

SEQ ID NO: 36940 - RNA, 20 nt, Artificial Sequence
  HTT spacer sequence TTCN PAM
ucauaacaucccagcggaac

SEQ ID NO: 36941 - RNA, 20 nt, Artificial Sequence
  HTT spacer sequence TTCN PAM
gcugggauguuaugaggaac

SEQ ID NO: 36942 - RNA, 20 nt, Artificial Sequence
  HTT spacer sequence TTCN PAM
auccuguccccaaguucauc

SEQ ID NO: 36943 - RNA, 20 nt, Artificial Sequence
  HTT spacer sequence TTCN PAM
uccucauccuccugccggcu

SEQ ID NO: 36944 - RNA, 20 nt, Artificial Sequence
  HTT spacer sequence TTCN PAM
uggccccucuuaugucugcu

SEQ ID NO: 36945 - RNA, 20 nt, Artificial Sequence
  HTT spacer sequence TTCN PAM
ugacgccacauccuucugga

SEQ ID NO: 36946 - RNA, 20 nt, Artificial Sequence
  HTT spacer sequence TTCN PAM
ggauucucuggaauugaauu

SEQ ID NO: 36947 - RNA, 20 nt, Artificial Sequence
  HTT spacer sequence TTCN PAM
cuggaauugaauuuugccuu

SEQ ID NO: 36948 - RNA, 20 nt, Artificial Sequence
  HTT spacer sequence TTCN PAM
agagaauccagaaggaugug

SEQ ID NO: 36949 - RNA, 20 nt, Artificial Sequence
  HTT spacer sequence TTCN PAM
auuccagagaauccagaagg

SEQ ID NO: 36950 - RNA, 20 nt, Artificial Sequence
  HTT spacer sequence TTCN PAM
caaagugcacaggauuacag

SEQ ID NO: 36951 - RNA, 20 nt, Artificial Sequence
  HTT spacer sequence TTCN PAM
acauguugcucaggcuaauc

SEQ ID NO: 36952 - RNA, 20 nt, Artificial Sequence
  HTT spacer sequence TTCN PAM
auagaaaauacaaaaauuag

SEQ ID NO: 36953 - RNA, 20 nt, Artificial Sequence
  HTT spacer sequence TTCN PAM
auagaaacaggauuucaaca

SEQ ID NO: 36954 - RNA, 20 nt, Artificial Sequence
  HTT spacer sequence TTCN PAM
ugaguagcugggaguauagg

SEQ ID NO: 36955 - RNA, 20 nt, Artificial Sequence
  HTT spacer sequence TTCN PAM
gacagggucucacucuguuu

SEQ ID NO: 36956 - RNA, 20 nt, Artificial Sequence
  HTT spacer sequence TTCN PAM
ccguagcgaaacauguaugu

SEQ ID NO: 36957 - RNA, 20 nt, Artificial Sequence
  HTT spacer sequence TTCN PAM
cuacggugaaguaugcaaug

SEQ ID NO: 36958 - RNA, 20 nt, Artificial Sequence
  HTT spacer sequence TTCN PAM
uuuccugccuguagcugcuc

SEQ ID NO: 36959 - RNA, 20 nt, Artificial Sequence
  HTT spacer sequence TTCN PAM
ugccuguagcugcucuuuua

SEQ ID NO: 36960 - RNA, 20 nt, Artificial Sequence
  HTT spacer sequence TTCN PAM
uuuaaggcuggcuuagugug

SEQ ID NO: 36961 - RNA, 20 nt, Artificial Sequence
  HTT spacer sequence TTCN PAM
ugugcccuccugcuuccuuc

SEQ ID NO: 36962 - RNA, 20 nt, Artificial Sequence
  HTT spacer sequence TTCN PAM
uucaugaggggucccucccu

SEQ ID NO: 36963 - RNA, 20 nt, Artificial Sequence
  HTT spacer sequence TTCN PAM
ugaggggucccucccucugu

SEQ ID NO: 36964 - RNA, 20 nt, Artificial Sequence
  HTT spacer sequence TTCN PAM
cauugcccauggugguuugu

SEQ ID NO: 36965 - RNA, 20 nt, Artificial Sequence
  HTT spacer sequence TTCN PAM
cucuuguuucucaagccaug

SEQ ID NO: 36966 - RNA, 20 nt, Artificial Sequence
  HTT spacer sequence TTCN PAM
caagccauggcagccugccu

SEQ ID NO: 36967 - RNA, 20 nt, Artificial Sequence
  HTT spacer sequence TTCN PAM
uucuuucuaggucucucuca

SEQ ID NO: 36968 - RNA, 20 nt, Artificial Sequence
  HTT spacer sequence TTCN PAM
uucuaggucucucucauccu

SEQ ID NO: 36969 - RNA, 20 nt, Artificial Sequence
  HTT spacer sequence TTCN PAM
aggucucucucauccuaggc

SEQ ID NO: 36970 - RNA, 20 nt, Artificial Sequence
  HTT spacer sequence TTCN PAM
guggagcugcccucuuguca

SEQ ID NO: 36971 - RNA, 20 nt, Artificial Sequence
  HTT spacer sequence TTCN PAM
cugucuagccacuuaauuga

SEQ ID NO: 36972 - RNA, 20 nt, Artificial Sequence
  HTT spacer sequence TTCN PAM
ucgaguugcuguccaugguc

SEQ ID NO: 36973 - RNA, 20 nt, Artificial Sequence
  HTT spacer sequence TTCN PAM
cuguguuucugccucucucc

SEQ ID NO: 36974 - RNA, 20 nt, Artificial Sequence
  HTT spacer sequence TTCN PAM
gccucucuccuuggccuugg

SEQ ID NO: 36975 - RNA, 20 nt, Artificial Sequence
  HTT spacer sequence TTCN PAM
cuugcugguccuuguagucc

SEQ ID NO: 36976 - RNA, 20 nt, Artificial Sequence
  HTT spacer sequence TTCN PAM
cgacacgggacuuguccugc

SEQ ID NO: 36977 - RNA, 20 nt, Artificial Sequence
  HTT spacer sequence TTCN PAM
auuuuaagugcaagucugag

SEQ ID NO: 36978 - RNA, 20 nt, Artificial Sequence
  HTT spacer sequence TTCN PAM
uguuaauuagaucauuaggg

SEQ ID NO: 36979 - RNA, 20 nt, Artificial Sequence
  HTT spacer sequence TTCN PAM
gaaucccagcaucauaguau

SEQ ID NO: 36980 - RNA, 20 nt, Artificial Sequence
  HTT spacer sequence TTCN PAM
gaacaucccuaaugaucuaa

SEQ ID NO: 36981 - RNA, 20 nt, Artificial Sequence
  HTT spacer sequence TTCN PAM
uccucccgcuaccccaggaa

SEQ ID NO: 36982 - RNA, 20 nt, Artificial Sequence
  HTT spacer sequence TTCN PAM
ugggguagcgggaggaggaa

SEQ ID NO: 36983 - RNA, 20 nt, Artificial Sequence
  HTT spacer sequence TTCN PAM
accugaacuucccuaauagg

SEQ ID NO: 36984 - RNA, 20 nt, Artificial Sequence
  HTT spacer sequence TTCN PAM
gguggaagaugagacggacu

SEQ ID NO: 36985 - RNA, 20 nt, Artificial Sequence
  HTT spacer sequence TTCN PAM
cuaauaggcuccagcagcug

SEQ ID NO: 36986 - RNA, 20 nt, Artificial Sequence
  HTT spacer sequence TTCN PAM
uccaugccuugugcagugcu

SEQ ID NO: 36987 - RNA, 20 nt, Artificial Sequence
  HTT spacer sequence TTCN PAM
ccuguuugcuccuuauuaca

SEQ ID NO: 36988 - RNA, 20 nt, Artificial Sequence
  HTT spacer sequence TTCN PAM
cagggcuguaauaaggagca

SEQ ID NO: 36989 - RNA, 20 nt, Artificial Sequence
  HTT spacer sequence TTCN PAM
aucuuacaccuaaggaagcu

SEQ ID NO: 36990 - RNA, 20 nt, Artificial Sequence
  HTT spacer sequence TTCN PAM
uuagguguaagauggaauua

SEQ ID NO: 36991 - RNA, 20 nt, Artificial Sequence
  HTT spacer sequence TTCN PAM
gaucguggcucuacugucua

SEQ ID NO: 36992 - RNA, 20 nt, Artificial Sequence
  HTT spacer sequence TTCN PAM
gagccuguguugacacucag

SEQ ID NO: 36993 - RNA, 20 nt, Artificial Sequence
  HTT spacer sequence TTCN PAM
agguggcugagugucaacac

SEQ ID NO: 36994 - RNA, 20 nt, Artificial Sequence
  HTT spacer sequence TTCN PAM
auuaccuguucaaaaccccu

SEQ ID NO: 36995 - RNA, 20 nt, Artificial Sequence
  HTT spacer sequence TTCN PAM
aaaccccuacaucccggguc

SEQ ID NO: 36996 - RNA, 20 nt, Artificial Sequence
  HTT spacer sequence TTCN PAM
uugaaggcagugcaugccuc

SEQ ID NO: 36997 - RNA, 20 nt, Artificial Sequence
  HTT spacer sequence TTCN PAM
aggaagaugcagccaggcca

SEQ ID NO: 36998 - RNA, 20 nt, Artificial Sequence
  HTT spacer sequence TTCN PAM
cucagggggcccaugcagga

SEQ ID NO: 36999 - RNA, 20 nt, Artificial Sequence
  HTT spacer sequence TTCN PAM
ugcaugggcccccugaguga

SEQ ID NO: 37000 - RNA, 20 nt, Artificial Sequence
  HTT spacer sequence TTCN PAM
guggggcccucuguuccugc

SEQ ID NO: 37001 - RNA, 20 nt, Artificial Sequence
  HTT spacer sequence TTCN PAM
gcacuggccucauccuucug

SEQ ID NO: 37002 - RNA, 20 nt, Artificial Sequence
  HTT spacer sequence TTCN PAM
uggucagcauuguccccucc

SEQ ID NO: 37003 - RNA, 20 nt, Artificial Sequence
  HTT spacer sequence TTCN PAM
cuacacuugcuuccugguca

SEQ ID NO: 37004 - RNA, 20 nt, Artificial Sequence
  HTT spacer sequence TTCN PAM
ugggauuucucuacacuugc

SEQ ID NO: 37005 - RNA, 20 nt, Artificial Sequence
  HTT spacer sequence TTCN PAM
aaugccuugucucuggcucc

SEQ ID NO: 37006 - RNA, 20 nt, Artificial Sequence
  HTT spacer sequence TTCN PAM
cugagugugcugcuucuguu

SEQ ID NO: 37007 - RNA, 20 nt, Artificial Sequence
  HTT spacer sequence TTCN PAM
guuagcucgcuuccuugguc

SEQ ID NO: 37008 - RNA, 20 nt, Artificial Sequence
  HTT spacer sequence TTCN PAM
uuggucucagguuauaguuu

SEQ ID NO: 37009 - RNA, 20 nt, Artificial Sequence
  HTT spacer sequence TTCN PAM
cuuuggggauguguugauuu

SEQ ID NO: 37010 - RNA, 20 nt, Artificial Sequence
  HTT spacer sequence TTCN PAM
agcaauucuugugcucccgc

SEQ ID NO: 37011 - RNA, 20 nt, Artificial Sequence
  HTT spacer sequence TTCN PAM
ugugcucccgccucccaaau

SEQ ID NO: 37012 - RNA, 20 nt, Artificial Sequence
  HTT spacer sequence TTCN PAM
agaccagccugaccaacaug

SEQ ID NO: 37013 - RNA, 20 nt, Artificial Sequence
  HTT spacer sequence TTCN PAM
ggccgggugugguggcucac

SEQ ID NO: 37014 - RNA, 20 nt, Artificial Sequence
  HTT spacer sequence TTCN PAM
gauuuaaauuucaggccggg

SEQ ID NO: 37015 - RNA, 20 nt, Artificial Sequence
  HTT spacer sequence TTCN PAM
cuguuucccaagucuugcug

SEQ ID NO: 37016 - RNA, 20 nt, Artificial Sequence
  HTT spacer sequence TTCN PAM
caagucuugcugccucuccc

SEQ ID NO: 37017 - RNA, 20 nt, Artificial Sequence
  HTT spacer sequence TTCN PAM
auccucuccuuuggauaaac

SEQ ID NO: 37018 - RNA, 20 nt, Artificial Sequence
  HTT spacer sequence TTCN PAM
uucuauccucuccuuuggau

SEQ ID NO: 37019 - RNA, 20 nt, Artificial Sequence
  HTT spacer sequence TTCN PAM
uggagcccugagaaggaugc

SEQ ID NO: 37020 - RNA, 20 nt, Artificial Sequence
  HTT spacer sequence TTCN PAM
cagggcuccaggaaucauga

SEQ ID NO: 37021 - RNA, 20 nt, Artificial Sequence
  HTT spacer sequence TTCN PAM
ccacagcauccuucucaggg

SEQ ID NO: 37022 - RNA, 20 nt, Artificial Sequence
  HTT spacer sequence TTCN PAM
accggcaaauuucuccacag

SEQ ID NO: 37023 - RNA, 20 nt, Artificial Sequence
  HTT spacer sequence TTCN PAM
caccuggccuccuucagcau

SEQ ID NO: 37024 - RNA, 20 nt, Artificial Sequence
  HTT spacer sequence TTCN PAM
gcauuucugucccucagucc

SEQ ID NO: 37025 - RNA, 20 nt, Artificial Sequence
  HTT spacer sequence TTCN PAM
gucccucaguccuuagcaag

SEQ ID NO: 37026 - RNA, 20 nt, Artificial Sequence
  HTT spacer sequence TTCN PAM
ugccuguguagcuguggcuc

SEQ ID NO: 37027 - RNA, 20 nt, Artificial Sequence
  HTT spacer sequence TTCN PAM
aggcgcugaguguucccuga

SEQ ID NO: 37028 - RNA, 20 nt, Artificial Sequence
  HTT spacer sequence TTCN PAM
cugacuccuucuccaggagc

SEQ ID NO: 37029 - RNA, 20 nt, Artificial Sequence
  HTT spacer sequence TTCN PAM
ccaggagcuguguucagacu

SEQ ID NO: 37030 - RNA, 20 nt, Artificial Sequence
  HTT spacer sequence TTCN PAM
gacuuucgcagcucuuggcu

SEQ ID NO: 37031 - RNA, 20 nt, Artificial Sequence
  HTT spacer sequence TTCN PAM
cagcucuuggcuuggagcuc

SEQ ID NO: 37032 - RNA, 20 nt, Artificial Sequence
  HTT spacer sequence TTCN PAM
uccucucucacugucgaccu

SEQ ID NO: 37033 - RNA, 20 nt, Artificial Sequence
  HTT spacer sequence TTCN PAM
ugaccaguccauuaaauaag

SEQ ID NO: 37034 - RNA, 20 nt, Artificial Sequence
  HTT spacer sequence TTCN PAM
agaccagccuggccaacaug

SEQ ID NO: 37035 - RNA, 20 nt, Artificial Sequence
  HTT spacer sequence TTCN PAM
ccauguuggccaggcugguc

SEQ ID NO: 37036 - RNA, 20 nt, Artificial Sequence
  HTT spacer sequence TTCN PAM
ccugccucagccucccaagu

SEQ ID NO: 37037 - RNA, 20 nt, Artificial Sequence
  HTT spacer sequence TTCN PAM
agcuguucuccugccucagc

SEQ ID NO: 37038 - RNA, 20 nt, Artificial Sequence
  HTT spacer sequence TTCN PAM
gguuucaagcuguucuccug

SEQ ID NO: 37039 - RNA, 20 nt, Artificial Sequence
  HTT spacer sequence TTCN PAM
gcuuagaaaaaucagaauuu

SEQ ID NO: 37040 - RNA, 20 nt, Artificial Sequence
  HTT spacer sequence TTCN PAM
aagcagaaacagauauccua

SEQ ID NO: 37041 - RNA, 20 nt, Artificial Sequence
  HTT spacer sequence TTCN PAM
gauuuuucuaagcagaaaca

SEQ ID NO: 37042 - RNA, 20 nt, Artificial Sequence
  HTT spacer sequence TTCN PAM
aaaugccagguguucugaau

SEQ ID NO: 37043 - RNA, 20 nt, Artificial Sequence
  HTT spacer sequence TTCN PAM
gaauacguaaguaugggaga

SEQ ID NO: 37044 - RNA, 20 nt, Artificial Sequence
  HTT spacer sequence TTCN PAM
gaacaccuggcauuuagaaa

SEQ ID NO: 37045 - RNA, 20 nt, Artificial Sequence
  HTT spacer sequence TTCN PAM
uuuuuauguaaaaucuucgc

SEQ ID NO: 37046 - RNA, 20 nt, Artificial Sequence
  HTT spacer sequence TTCN PAM
cguagccauguggcacugga

SEQ ID NO: 37047 - RNA, 20 nt, Artificial Sequence
  HTT spacer sequence TTCN PAM
ucucgguccagugccacaug

SEQ ID NO: 37048 - RNA, 20 nt, Artificial Sequence
  HTT spacer sequence TTCN PAM
ccuuaacuuuguuucuagga

SEQ ID NO: 37049 - RNA, 20 nt, Artificial Sequence
  HTT spacer sequence TTCN PAM
aggaauguuccggagaauca

SEQ ID NO: 37050 - RNA, 20 nt, Artificial Sequence
  HTT spacer sequence TTCN PAM
uagaaacaaaguuaaggaga

SEQ ID NO: 37051 - RNA, 20 nt, Artificial Sequence
  HTT spacer sequence TTCN PAM
ggagaaucacagcagcugcc

SEQ ID NO: 37052 - RNA, 20 nt, Artificial Sequence
  HTT spacer sequence TTCN PAM
ccggaacauuccuagaaaca

SEQ ID NO: 37053 - RNA, 20 nt, Artificial Sequence
  HTT spacer sequence TTCN PAM
gcagugauggcuguggcggc

SEQ ID NO: 37054 - RNA, 20 nt, Artificial Sequence
  HTT spacer sequence TTCN PAM
acacccuggacagcuugaac

SEQ ID NO: 37055 - RNA, 20 nt, Artificial Sequence
  HTT spacer sequence TTCN PAM
agcuguccaggguguagaaa

SEQ ID NO: 37056 - RNA, 20 nt, Artificial Sequence
  HTT spacer sequence TTCN PAM
augaucaccacccacccggc

SEQ ID NO: 37057 - RNA, 20 nt, Artificial Sequence
  HTT spacer sequence TTCN PAM
gcccaccagcgguagucggu

SEQ ID NO: 37058 - RNA, 20 nt, Artificial Sequence
  HTT spacer sequence TTCN PAM
gggucugcugcacuucugcc

SEQ ID NO: 37059 - RNA, 20 nt, Artificial Sequence
  HTT spacer sequence TTCN PAM
uaaugccccacagcccaggg

SEQ ID NO: 37060 - RNA, 20 nt, Artificial Sequence
  HTT spacer sequence TTCN PAM
uuuuccauuuuuugugaggg

SEQ ID NO: 37061 - RNA, 20 nt, Artificial Sequence
  HTT spacer sequence TTCN PAM
auuuuuugugagggcuugug

SEQ ID NO: 37062 - RNA, 20 nt, Artificial Sequence
  HTT spacer sequence TTCN PAM
caagcccucacaaaaaaugg

SEQ ID NO: 37063 - RNA, 20 nt, Artificial Sequence
  HTT spacer sequence TTCN PAM
gcugcauauuaauauuccuu

SEQ ID NO: 37064 - RNA, 20 nt, Artificial Sequence
  HTT spacer sequence TTCN PAM
uuucauggacagcauauuau

SEQ ID NO: 37065 - RNA, 20 nt, Artificial Sequence
  HTT spacer sequence TTCN PAM
uggacagcauauuauuggga

SEQ ID NO: 37066 - RNA, 20 nt, Artificial Sequence
  HTT spacer sequence TTCN PAM
aaauagcaguugcuuucuaa

SEQ ID NO: 37067 - RNA, 20 nt, Artificial Sequence
  HTT spacer sequence TTCN PAM
aaaugcgauuuucuuuggca

SEQ ID NO: 37068 - RNA, 20 nt, Artificial Sequence
  HTT spacer sequence TTCN PAM
uuggcagguucuuugacacc

SEQ ID NO: 37069 - RNA, 20 nt, Artificial Sequence
  HTT spacer sequence TTCN PAM
uugacaccauugcaucuugu

SEQ ID NO: 37070 - RNA, 20 nt, Artificial Sequence
  HTT spacer sequence TTCN PAM
aguccuuaaauugguuccau

SEQ ID NO: 37071 - RNA, 20 nt, Artificial Sequence
  HTT spacer sequence TTCN PAM
auagccagacauguugcaau

SEQ ID NO: 37072 - RNA, 20 nt, Artificial Sequence
  HTT spacer sequence TTCN PAM
gguuauccuuagauaaugaa

SEQ ID NO: 37073 - RNA, 20 nt, Artificial Sequence
  HTT spacer sequence TTCN PAM
uuaucuaaggauaaccagaa

SEQ ID NO: 37074 - RNA, 20 nt, Artificial Sequence
  HTT spacer sequence TTCN PAM
aaaccucuuggaaauguuau

SEQ ID NO: 37075 - RNA, 20 nt, Artificial Sequence
  HTT spacer sequence TTCN PAM
aagagguuuugaaauuugcu

SEQ ID NO: 37076 - RNA, 20 nt, Artificial Sequence
  HTT spacer sequence TTCN PAM
aaaaggcuuacuaagguucu

SEQ ID NO: 37077 - RNA, 20 nt, Artificial Sequence
  HTT spacer sequence TTCN PAM
cguuauggguggcccucuuu

SEQ ID NO: 37078 - RNA, 20 nt, Artificial Sequence
  HTT spacer sequence TTCN PAM
ggcuuaagcuccauuucuag

SEQ ID NO: 37079 - RNA, 20 nt, Artificial Sequence
  HTT spacer sequence TTCN PAM
aggugcuccaacacuccauu

SEQ ID NO: 37080 - RNA, 20 nt, Artificial Sequence
  HTT spacer sequence TTCN PAM
auacauauacaaauaaugga

SEQ ID NO: 37081 - RNA, 20 nt, Artificial Sequence
  HTT spacer sequence TTCN PAM
gcugggcgggggccaggguu

SEQ ID NO: 37082 - RNA, 20 nt, Artificial Sequence
  HTT spacer sequence TTCN PAM
ggaaggcucaagaucccacg

SEQ ID NO: 37083 - RNA, 20 nt, Artificial Sequence
  HTT spacer sequence TTCN PAM
agaaauacugugcugaggau

SEQ ID NO: 37084 - RNA, 20 nt, Artificial Sequence
  HTT spacer sequence TTCN PAM
ccagcgugggaucuugagcc

SEQ ID NO: 37085 - RNA, 20 nt, Artificial Sequence
  HTT spacer sequence TTCN PAM
uuuccccagcgugggaucuu

SEQ ID NO: 37086 - RNA, 20 nt, Artificial Sequence
  HTT spacer sequence TTCN PAM
ggagacaaaagagggcaggu

SEQ ID NO: 37087 - RNA, 20 nt, Artificial Sequence
  HTT spacer sequence TTCN PAM
uggcacucagcuggaaaguc

SEQ ID NO: 37088 - RNA, 20 nt, Artificial Sequence
  HTT spacer sequence TTCN PAM
agcugagugccaugaacugg

SEQ ID NO: 37089 - RNA, 20 nt, Artificial Sequence
  HTT spacer sequence TTCN PAM
uaaccauccacucugugccg

SEQ ID NO: 37090 - RNA, 20 nt, Artificial Sequence
  HTT spacer sequence TTCN PAM
guuggaggagacagaccagu

SEQ ID NO: 37091 - RNA, 20 nt, Artificial Sequence
  HTT spacer sequence TTCN PAM
aaugucgucacuggucuguc

SEQ ID NO: 37092 - RNA, 20 nt, Artificial Sequence
  HTT spacer sequence TTCN PAM
gucuccugcccccacagugc

SEQ ID NO: 37093 - RNA, 20 nt, Artificial Sequence
  HTT spacer sequence TTCN PAM
gugcugcuuuaacgugcaua

SEQ ID NO: 37094 - RNA, 20 nt, Artificial Sequence
  HTT spacer sequence TTCN PAM
augcacguuaaagcagcaca

SEQ ID NO: 37095 - RNA, 20 nt, Artificial Sequence
  HTT spacer sequence TTCN PAM
gcagaucacuccuuuucuga

SEQ ID NO: 37096 - RNA, 20 nt, Artificial Sequence
  HTT spacer sequence TTCN PAM
gacagaugggccugcuuacu

SEQ ID NO: 37097 - RNA, 20 nt, Artificial Sequence
  HTT spacer sequence TTCN PAM
gauauaacaucagaguaagc

SEQ ID NO: 37098 - RNA, 20 nt, Artificial Sequence
  HTT spacer sequence TTCN PAM
gagcuuucugauauaacauc

SEQ ID NO: 37099 - RNA, 20 nt, Artificial Sequence
  HTT spacer sequence TTCN PAM
cagauucagagcuuucugau

SEQ ID NO: 37100 - RNA, 20 nt, Artificial Sequence
  HTT spacer sequence TTCN PAM
ggggacacaauucccagauu

SEQ ID NO: 37101 - RNA, 20 nt, Artificial Sequence
  HTT spacer sequence TTCN PAM
guuacuccaauucaggggac

SEQ ID NO: 37102 - RNA, 20 nt, Artificial Sequence
  HTT spacer sequence TTCN PAM
uuuaaacacucaucaucuaa

SEQ ID NO: 37103 - RNA, 20 nt, Artificial Sequence
  HTT spacer sequence TTCN PAM
aaacuaaauuuaccuuuggu

SEQ ID NO: 37104 - RNA, 20 nt, Artificial Sequence
  HTT spacer sequence TTCN PAM
gcaagcgucuucauucagcc

SEQ ID NO: 37105 - RNA, 20 nt, Artificial Sequence
  HTT spacer sequence TTCN PAM
uucagcccucugagggcaaa

SEQ ID NO: 37106 - RNA, 20 nt, Artificial Sequence
  HTT spacer sequence TTCN PAM
gcccucugagggcaaacuac

SEQ ID NO: 37107 - RNA, 20 nt, Artificial Sequence
  HTT spacer sequence TTCN PAM
gugacuguuucgugaccccc

SEQ ID NO: 37108 - RNA, 20 nt, Artificial Sequence
  HTT spacer sequence TTCN PAM
ugacccccucugauccaguu

SEQ ID NO: 37109 - RNA, 20 nt, Artificial Sequence
  HTT spacer sequence TTCN PAM
uuuauaaccuucuguauugu

SEQ ID NO: 37110 - RNA, 20 nt, Artificial Sequence
  HTT spacer sequence TTCN PAM
guauuguuccuucuauuauc

SEQ ID NO: 37111 - RNA, 20 nt, Artificial Sequence
  HTT spacer sequence TTCN PAM
uucuauuauccugaaauaac

SEQ ID NO: 37112 - RNA, 20 nt, Artificial Sequence
  HTT spacer sequence TTCN PAM
auuauccugaaauaacauua

SEQ ID NO: 37113 - RNA, 20 nt, Artificial Sequence
  HTT spacer sequence TTCN PAM
ggauaauagaaggaacaaua

SEQ ID NO: 37114 - RNA, 20 nt, Artificial Sequence
  HTT spacer sequence TTCN PAM
caaggugcugggauuauagg

SEQ ID NO: 37115 - RNA, 20 nt, Artificial Sequence
  HTT spacer sequence TTCN PAM
agaccagccuggccaacaug

SEQ ID NO: 37116 - RNA, 20 nt, Artificial Sequence
  HTT spacer sequence TTCN PAM
ucauguuggccaggcugguc

SEQ ID NO: 37117 - RNA, 20 nt, Artificial Sequence
  HTT spacer sequence TTCN PAM
guagagacagcauuucauca

SEQ ID NO: 37118 - RNA, 20 nt, Artificial Sequence
  HTT spacer sequence TTCN PAM
gaguagcagggacuacaggc

SEQ ID NO: 37119 - RNA, 20 nt, Artificial Sequence
  HTT spacer sequence TTCN PAM
cccgccucagccuucugagu

SEQ ID NO: 37120 - RNA, 20 nt, Artificial Sequence
  HTT spacer sequence TTCN PAM
agcgauucucccgccucagc

SEQ ID NO: 37121 - RNA, 20 nt, Artificial Sequence
  HTT spacer sequence TTCN PAM
uccuagguucaagcgauucu

SEQ ID NO: 37122 - RNA, 20 nt, Artificial Sequence
  HTT spacer sequence TTCN PAM
aaaaauaucguucuuuaaug

SEQ ID NO: 37123 - RNA, 20 nt, Artificial Sequence
  HTT spacer sequence TTCN PAM
uuaaugguaauguaaaggua

SEQ ID NO: 37124 - RNA, 20 nt, Artificial Sequence
  HTT spacer sequence TTCN PAM
accacggggacaccuuagac

SEQ ID NO: 37125 - RNA, 20 nt, Artificial Sequence
  HTT spacer sequence TTCN PAM
uuccaccacggggacaccuu

SEQ ID NO: 37126 - RNA, 20 nt, Artificial Sequence
  HTT spacer sequence TTCN PAM
gguuuaaaccccugcucuua

SEQ ID NO: 37127 - RNA, 20 nt, Artificial Sequence
  HTT spacer sequence TTCN PAM
agcuguggguggugggggau

SEQ ID NO: 37128 - RNA, 20 nt, Artificial Sequence
  HTT spacer sequence TTCN PAM
augagaugagaaaaaugaau

SEQ ID NO: 37129 - RNA, 20 nt, Artificial Sequence
  HTT spacer sequence TTCN PAM
caucucauggaaauaaaaag

SEQ ID NO: 37130 - RNA, 20 nt, Artificial Sequence
  HTT spacer sequence TTCN PAM
uuuuucucaucucauggaaa

SEQ ID NO: 37131 - RNA, 20 nt, Artificial Sequence
  HTT spacer sequence TTCN PAM
aguaauucauuuuucucauc

SEQ ID NO: 37132 - RNA, 20 nt, Artificial Sequence
  HTT spacer sequence TTCN PAM
cacuucuaguaauucauuuu

SEQ ID NO: 37133 - RNA, 20 nt, Artificial Sequence
  HTT spacer sequence TTCN PAM
gcaacuggauacagcaauuu

SEQ ID NO: 37134 - RNA, 20 nt, Artificial Sequence
  HTT spacer sequence TTCN PAM
ugcugcuuacucuugacccu

SEQ ID NO: 37135 - RNA, 20 nt, Artificial Sequence
  HTT spacer sequence TTCN PAM
cucucaaucugucuuaccuc

SEQ ID NO: 37136 - RNA, 20 nt, Artificial Sequence
  HTT spacer sequence TTCN PAM
ccaagagguaagacagauug

SEQ ID NO: 37137 - RNA, 20 nt, Artificial Sequence
  HTT spacer sequence TTCN PAM
cagcucaucuuguucugagu

SEQ ID NO: 37138 - RNA, 20 nt, Artificial Sequence
  HTT spacer sequence TTCN PAM
gagucacccuagauuuggga

SEQ ID NO: 37139 - RNA, 20 nt, Artificial Sequence
  HTT spacer sequence TTCN PAM
uucgccaccaguaccgggcg

SEQ ID NO: 37140 - RNA, 20 nt, Artificial Sequence
  HTT spacer sequence TTCN PAM
ccaccaguaccgggcggugu

SEQ ID NO: 37141 - RNA, 20 nt, Artificial Sequence
  HTT spacer sequence TTCN PAM
gccccaauuuguagcagcac

SEQ ID NO: 37142 - RNA, 20 nt, Artificial Sequence
  HTT spacer sequence TTCN PAM
uuaugucuacugcucauauu

SEQ ID NO: 37143 - RNA, 20 nt, Artificial Sequence
  HTT spacer sequence TTCN PAM
aauaugagcaguagacauaa

SEQ ID NO: 37144 - RNA, 20 nt, Artificial Sequence
  HTT spacer sequence TTCN PAM
cuuucagaggcucauuaccc

SEQ ID NO: 37145 - RNA, 20 nt, Artificial Sequence
  HTT spacer sequence TTCN PAM
gaggcucauuacccuauagc

SEQ ID NO: 37146 - RNA, 20 nt, Artificial Sequence
  HTT spacer sequence TTCN PAM
cagugggccguccugccagc

SEQ ID NO: 37147 - RNA, 20 nt, Artificial Sequence
  HTT spacer sequence TTCN PAM
uguucguuaguuuucacauu

SEQ ID NO: 37148 - RNA, 20 nt, Artificial Sequence
  HTT spacer sequence TTCN PAM
uuaguuuucacauugacaca

SEQ ID NO: 37149 - RNA, 20 nt, Artificial Sequence
  HTT spacer sequence TTCN PAM
cauugacacauaauuuacaa

SEQ ID NO: 37150 - RNA, 20 nt, Artificial Sequence
  HTT spacer sequence TTCN PAM
aucaacuguagucaguaaca

SEQ ID NO: 37151 - RNA, 20 nt, Artificial Sequence
  HTT spacer sequence TTCN PAM
aacaguucccucuuccucug

SEQ ID NO: 37152 - RNA, 20 nt, Artificial Sequence
  HTT spacer sequence TTCN PAM
cucuuccucugccacauccu

SEQ ID NO: 37153 - RNA, 20 nt, Artificial Sequence
  HTT spacer sequence TTCN PAM
ucugccacauccugccccuc

SEQ ID NO: 37154 - RNA, 20 nt, Artificial Sequence
  HTT spacer sequence TTCN PAM
gcccauugcagaaggccaua

SEQ ID NO: 37155 - RNA, 20 nt, Artificial Sequence
  HTT spacer sequence TTCN PAM
gcaaugggcugaacagaggg

SEQ ID NO: 37156 - RNA, 20 nt, Artificial Sequence
  HTT spacer sequence TTCN PAM
auggccuucugcaaugggcu

SEQ ID NO: 37157 - RNA, 20 nt, Artificial Sequence
  HTT spacer sequence TTCN PAM
auuucuauggccuucugcaa

SEQ ID NO: 37158 - RNA, 20 nt, Artificial Sequence
  HTT spacer sequence TTCN PAM
gccucucaaaauacugggau

SEQ ID NO: 37159 - RNA, 20 nt, Artificial Sequence
  HTT spacer sequence TTCN PAM
agacuagccugggcugccua

SEQ ID NO: 37160 - RNA, 20 nt, Artificial Sequence
  HTT spacer sequence TTCN PAM
ggagauggggucuugcuagg

SEQ ID NO: 37161 - RNA, 20 nt, Artificial Sequence
  HTT spacer sequence TTCN PAM
gcugcuugggaggcugaggc

SEQ ID NO: 37162 - RNA, 20 nt, Artificial Sequence
  HTT spacer sequence TTCN PAM
ccagagacaacgucuugcug

SEQ ID NO: 37163 - RNA, 20 nt, Artificial Sequence
  HTT spacer sequence TTCN PAM
uuuuuccccagagacaacgu

SEQ ID NO: 37164 - RNA, 20 nt, Artificial Sequence
  HTT spacer sequence TTCN PAM
uucuuuuuuccccagagaca

SEQ ID NO: 37165 - RNA, 20 nt, Artificial Sequence
  HTT spacer sequence TTCN PAM
guuucuuucuuuuuucccca

SEQ ID NO: 37166 - RNA, 20 nt, Artificial Sequence
  HTT spacer sequence TTCN PAM
gagucuggccccuuucggug

SEQ ID NO: 37167 - RNA, 20 nt, Artificial Sequence
  HTT spacer sequence TTCN PAM
gugagcagugucuaaaguuc

SEQ ID NO: 37168 - RNA, 20 nt, Artificial Sequence
  HTT spacer sequence TTCN PAM
gucgcguguugcccacgcgu

SEQ ID NO: 37169 - RNA, 20 nt, Artificial Sequence
  HTT spacer sequence TTCN PAM
cuucaccaguugggaaacag

SEQ ID NO: 37170 - RNA, 20 nt, Artificial Sequence
  HTT spacer sequence TTCN PAM
ccaguugggaaacagagaaa

SEQ ID NO: 37171 - RNA, 20 nt, Artificial Sequence
  HTT spacer sequence TTCN PAM
caacuggugaagugaaaaca

SEQ ID NO: 37172 - RNA, 20 nt, Artificial Sequence
  HTT spacer sequence TTCN PAM
cuguuucccaacuggugaag

SEQ ID NO: 37173 - RNA, 20 nt, Artificial Sequence
  HTT spacer sequence TTCN PAM
acagauuuaaacuuuuuaaa

SEQ ID NO: 37174 - RNA, 20 nt, Artificial Sequence
  HTT spacer sequence TTCN PAM
cuucuaaauccugagggauu

SEQ ID NO: 37175 - RNA, 20 nt, Artificial Sequence
  HTT spacer sequence TTCN PAM
aaauccugagggauuacagg

SEQ ID NO: 37176 - RNA, 20 nt, Artificial Sequence
  HTT spacer sequence TTCN PAM
uguaaucccucaggauuuag

SEQ ID NO: 37177 - RNA, 20 nt, Artificial Sequence
  HTT spacer sequence TTCN PAM
gaauauucuuagcuugaugu

SEQ ID NO: 37178 - RNA, 20 nt, Artificial Sequence
  HTT spacer sequence TTCN PAM
gaaauacaacaacuuuuccu

SEQ ID NO: 37179 - RNA, 20 nt, Artificial Sequence
  HTT spacer sequence TTCN PAM
uagcuugaugugaccucugu

SEQ ID NO: 37180 - RNA, 20 nt, Artificial Sequence
  HTT spacer sequence TTCN PAM
cauugcggcaaagggccuua

SEQ ID NO: 37181 - RNA, 20 nt, Artificial Sequence
  HTT spacer sequence TTCN PAM
gggucugaccgagcgacguc

SEQ ID NO: 37182 - RNA, 20 nt, Artificial Sequence
  HTT spacer sequence TTCN PAM
cacguauucaaaaagaaaaa

SEQ ID NO: 37183 - RNA, 20 nt, Artificial Sequence
  HTT spacer sequence TTCN PAM
aaaagaaaaaaacaauaaag

SEQ ID NO: 37184 - RNA, 20 nt, Artificial Sequence
  HTT spacer sequence TTCN PAM
uuuugaauacgugggaauua

SEQ ID NO: 37185 - RNA, 20 nt, Artificial Sequence
  HTT spacer sequence TTCN PAM
cacuuuauuguuuuuuucuu

SEQ ID NO: 37186 - RNA, 20 nt, Artificial Sequence
  HTT spacer sequence TTCN PAM
cucuacacugacuucucacu

SEQ ID NO: 37187 - RNA, 20 nt, Artificial Sequence
  HTT spacer sequence TTCN PAM
ccacuaacacagguuauuuc

SEQ ID NO: 37188 - RNA, 20 nt, Artificial Sequence
  HTT spacer sequence TTCN PAM
uccccacuaacacagguuau

SEQ ID NO: 37189 - RNA, 20 nt, Artificial Sequence
  HTT spacer sequence TTCN PAM
auaacguauaacaucaacau

SEQ ID NO: 37190 - RNA, 20 nt, Artificial Sequence
  HTT spacer sequence TTCN PAM
uugggaaacgaacaguaaaa

SEQ ID NO: 37191 - RNA, 20 nt, Artificial Sequence
  HTT spacer sequence TTCN PAM
caaugaaacaucaccacucu

SEQ ID NO: 37192 - RNA, 20 nt, Artificial Sequence
  HTT spacer sequence TTCN PAM
uuucccaaugaaacaucacc

SEQ ID NO: 37193 - RNA, 20 nt, Artificial Sequence
  HTT spacer sequence TTCN PAM
uguuuuacuguucguuuccc

SEQ ID NO: 37194 - RNA, 20 nt, Artificial Sequence
  HTT spacer sequence TTCN PAM
uucuggcaguuggcaacuuu

SEQ ID NO: 37195 - RNA, 20 nt, Artificial Sequence
  HTT spacer sequence TTCN PAM
ggcaguuggcaacuuucacg

SEQ ID NO: 37196 - RNA, 20 nt, Artificial Sequence
  HTT spacer sequence TTCN PAM
cggcagauggagaauuucaa

SEQ ID NO: 37197 - RNA, 20 nt, Artificial Sequence
  HTT spacer sequence TTCN PAM
ccaucugccgugaaaguugc

SEQ ID NO: 37198 - RNA, 20 nt, Artificial Sequence
  HTT spacer sequence TTCN PAM
aaagcaauugcucaauuauc

SEQ ID NO: 37199 - RNA, 20 nt, Artificial Sequence
  HTT spacer sequence TTCN PAM
gaaauaaaggugcugauuga

SEQ ID NO: 37200 - RNA, 20 nt, Artificial Sequence
  HTT spacer sequence TTCN PAM
gaacucacacuggcuauguu

SEQ ID NO: 37201 - RNA, 20 nt, Artificial Sequence
  HTT spacer sequence TTCN PAM
aucagcaccuuuauuucaga

SEQ ID NO: 37202 - RNA, 20 nt, Artificial Sequence
  HTT spacer sequence TTCN PAM
ggcaagcauuuuaauuuucu

SEQ ID NO: 37203 - RNA, 20 nt, Artificial Sequence
  HTT spacer sequence TTCN PAM
gccuguuaaauucuguuuuc

SEQ ID NO: 37204 - RNA, 20 nt, Artificial Sequence
  HTT spacer sequence TTCN PAM
guuuucuuuaguuuuucaua

SEQ ID NO: 37205 - RNA, 20 nt, Artificial Sequence
  HTT spacer sequence TTCN PAM
uuaguuuuucauaugugguu

SEQ ID NO: 37206 - RNA, 20 nt, Artificial Sequence
  HTT spacer sequence TTCN PAM
uaugugguuuauuguagcuu

SEQ ID NO: 37207 - RNA, 20 nt, Artificial Sequence
  HTT spacer sequence TTCN PAM
uaagcuacaauaaaccacau

SEQ ID NO: 37208 - RNA, 20 nt, Artificial Sequence
  HTT spacer sequence TTCN PAM
gauauggcaauauuuaaaac

SEQ ID NO: 37209 - RNA, 20 nt, Artificial Sequence
  HTT spacer sequence TTCN PAM
aaaacagacaaguuguuuua

SEQ ID NO: 37210 - RNA, 20 nt, Artificial Sequence
  HTT spacer sequence TTCN PAM
aguucuaaaacagacaaguu

SEQ ID NO: 37211 - RNA, 20 nt, Artificial Sequence
  HTT spacer sequence TTCN PAM
guauuuugcaaauaagcuca

SEQ ID NO: 37212 - RNA, 20 nt, Artificial Sequence
  HTT spacer sequence TTCN PAM
ggauggcagugagcuuauuu

SEQ ID NO: 37213 - RNA, 20 nt, Artificial Sequence
  HTT spacer sequence TTCN PAM
agaagacacagucuguccag

SEQ ID NO: 37214 - RNA, 20 nt, Artificial Sequence
  HTT spacer sequence TTCN PAM
agaaggagcaacagaugcau

SEQ ID NO: 37215 - RNA, 20 nt, Artificial Sequence
  HTT spacer sequence TTCN PAM
ccagacaucuggggacuaag

SEQ ID NO: 37216 - RNA, 20 nt, Artificial Sequence
  HTT spacer sequence TTCN PAM
gacuuggcagccaaacuugg

SEQ ID NO: 37217 - RNA, 20 nt, Artificial Sequence
  HTT spacer sequence TTCN PAM
aaguuuggcugccaagucag

SEQ ID NO: 37218 - RNA, 20 nt, Artificial Sequence
  HTT spacer sequence TTCN PAM
cuauugcacauuccaaguuu

SEQ ID NO: 37219 - RNA, 20 nt, Artificial Sequence
  HTT spacer sequence TTCN PAM
uacuauuucucuauugcaca

SEQ ID NO: 37220 - RNA, 20 nt, Artificial Sequence
  HTT spacer sequence TTCN PAM
cuucugugauuaugucguaa

SEQ ID NO: 37221 - RNA, 20 nt, Artificial Sequence
  HTT spacer sequence TTCN PAM
gugauuaugucguaaguuug

SEQ ID NO: 37222 - RNA, 20 nt, Artificial Sequence
  HTT spacer sequence TTCN PAM
aacuuacgacauaaucacag

SEQ ID NO: 37223 - RNA, 20 nt, Artificial Sequence
  HTT spacer sequence TTCN PAM
ccugguccccaccucccuca

SEQ ID NO: 37224 - RNA, 20 nt, Artificial Sequence
  HTT spacer sequence TTCN PAM
agaggguccaugcaaguguc

SEQ ID NO: 37225 - RNA, 20 nt, Artificial Sequence
  HTT spacer sequence TTCN PAM
auggagcuuggcaggacacc

SEQ ID NO: 37226 - RNA, 20 nt, Artificial Sequence
  HTT spacer sequence TTCN PAM
agauuuaguuucgauggagc

SEQ ID NO: 37227 - RNA, 20 nt, Artificial Sequence
  HTT spacer sequence TTCN PAM
uucuagauuuaguuucgaug

SEQ ID NO: 37228 - RNA, 20 nt, Artificial Sequence
  HTT spacer sequence TTCN PAM
gcugugacauauaauuggag

SEQ ID NO: 37229 - RNA, 20 nt, Artificial Sequence
  HTT spacer sequence TTCN PAM
agucacuggauucuaaguug

SEQ ID NO: 37230 - RNA, 20 nt, Artificial Sequence
  HTT spacer sequence TTCN PAM
aaguuggacugugagaguuu

SEQ ID NO: 37231 - RNA, 20 nt, Artificial Sequence
  HTT spacer sequence TTCN PAM
cucaaauuaacaaacauacc

SEQ ID NO: 37232 - RNA, 20 nt, Artificial Sequence
  HTT spacer sequence TTCN PAM
auugcuucccucaaauuaac

SEQ ID NO: 37233 - RNA, 20 nt, Artificial Sequence
  HTT spacer sequence TTCN PAM
gauuuuaaauuuuuuuaaaa

SEQ ID NO: 37234 - RNA, 20 nt, Artificial Sequence
  HTT spacer sequence TTCN PAM
agcaacucgagaggcugagg

SEQ ID NO: 37235 - RNA, 20 nt, Artificial Sequence
  HTT spacer sequence TTCN PAM
uaccucagccucucgaguug

SEQ ID NO: 37236 - RNA, 20 nt, Artificial Sequence
  HTT spacer sequence TTCN PAM
caaagagcugugauuacagg

SEQ ID NO: 37237 - RNA, 20 nt, Artificial Sequence
  HTT spacer sequence TTCN PAM
agaccagccuggcaacacag

SEQ ID NO: 37238 - RNA, 20 nt, Artificial Sequence
  HTT spacer sequence TTCN PAM
cuguguugccaggcuggucu

SEQ ID NO: 37239 - RNA, 20 nt, Artificial Sequence
  HTT spacer sequence TTCN PAM
uuuuuugguagaggcagggu

SEQ ID NO: 37240 - RNA, 20 nt, Artificial Sequence
  HTT spacer sequence TTCN PAM
ucucuuucuuuuuuugguag

SEQ ID NO: 37241 - RNA, 20 nt, Artificial Sequence
  HTT spacer sequence TTCN PAM
uccucucuuucuuuuuuugg

SEQ ID NO: 37242 - RNA, 20 nt, Artificial Sequence
  HTT spacer sequence TTCN PAM
uucuuccucucuuucuuuuu

SEQ ID NO: 37243 - RNA, 20 nt, Artificial Sequence
  HTT spacer sequence TTCN PAM
cagucucucagguggcuggg

SEQ ID NO: 37244 - RNA, 20 nt, Artificial Sequence
  HTT spacer sequence TTCN PAM
gggcucaagcaauccucccu

SEQ ID NO: 37245 - RNA, 20 nt, Artificial Sequence
  HTT spacer sequence TTCN PAM
acaaauuaacuuaaaaaaau

SEQ ID NO: 37246 - RNA, 20 nt, Artificial Sequence
  HTT spacer sequence TTCN PAM
uugucacauuuuaugaugga

SEQ ID NO: 37247 - RNA, 20 nt, Artificial Sequence
  HTT spacer sequence TTCN PAM
uguuuaaaugccguucucuu

SEQ ID NO: 37248 - RNA, 20 nt, Artificial Sequence
  HTT spacer sequence TTCN PAM
cuuuaaagaaaaaaaaauaa

SEQ ID NO: 37249 - RNA, 20 nt, Artificial Sequence
  HTT spacer sequence TTCN PAM
uuaaagagaacggcauuuaa

SEQ ID NO: 37250 - RNA, 20 nt, Artificial Sequence
  HTT spacer sequence TTCN PAM
ccaugguaaauaugugaugc

SEQ ID NO: 37251 - RNA, 20 nt, Artificial Sequence
  HTT spacer sequence TTCN PAM
uccguuuauuuguuuuuuug

SEQ ID NO: 37252 - RNA, 20 nt, Artificial Sequence
  HTT spacer sequence TTCN PAM
auauuuauauuaaaaauauu

SEQ ID NO: 37253 - RNA, 20 nt, Artificial Sequence
  HTT spacer sequence TTCN PAM
uugucacaaacaugguaucu

SEQ ID NO: 37254 - RNA, 20 nt, Artificial Sequence
  HTT spacer sequence TTCN PAM
gaaucagaaaaggaagccga

SEQ ID NO: 37255 - RNA, 20 nt, Artificial Sequence
  HTT spacer sequence TTCN PAM
gaauauuuaacacuguuuug

SEQ ID NO: 37256 - RNA, 20 nt, Artificial Sequence
  HTT spacer sequence TTCN PAM
gauucagaauauuuaacacu

SEQ ID NO: 37257 - RNA, 20 nt, Artificial Sequence
  HTT spacer sequence TTCN PAM
uuuucugauucagaauauuu

SEQ ID NO: 37258 - RNA, 20 nt, Artificial Sequence
  HTT spacer sequence TTCN PAM
guuggagagucggcuuccuu

SEQ ID NO: 37259 - RNA, 20 nt, Artificial Sequence
  HTT spacer sequence TTCN PAM
ggugaugacaauuuauuaau

SEQ ID NO: 37260 - RNA, 20 nt, Artificial Sequence
  HTT spacer sequence TTCN PAM
cuauugaaguaguuuuucua

SEQ ID NO: 37261 - RNA, 20 nt, Artificial Sequence
  HTT spacer sequence TTCN PAM
auagagaaaguaaagcaaaa

SEQ ID NO: 37262 - RNA, 20 nt, Artificial Sequence
  HTT spacer sequence TTCN PAM
auuuuguucuacuuuuaagg

SEQ ID NO: 37263 - RNA, 20 nt, Artificial Sequence
  HTT spacer sequence TTCN PAM
acuuuuaaggauaauauaau

SEQ ID NO: 37264 - RNA, 20 nt, Artificial Sequence
  HTT spacer sequence TTCN PAM
cagaaauauaagaaaaaaga

SEQ ID NO: 37265 - RNA, 20 nt, Artificial Sequence
  HTT spacer sequence TTCN PAM
gugaaaaacagcauuauaaa

SEQ ID NO: 37266 - RNA, 20 nt, Artificial Sequence
  HTT spacer sequence TTCN PAM
uauauuucugugaaaaacag

SEQ ID NO: 37267 - RNA, 20 nt, Artificial Sequence
  HTT spacer sequence TTCN PAM
gauuuuuggauuugggauga

SEQ ID NO: 37268 - RNA, 20 nt, Artificial Sequence
  HTT spacer sequence TTCN PAM
gaagcuuuuugagugcugac

SEQ ID NO: 37269 - RNA, 20 nt, Artificial Sequence
  HTT spacer sequence TTCN PAM
gaauuuggagcauuuuggau

SEQ ID NO: 37270 - RNA, 20 nt, Artificial Sequence
  HTT spacer sequence TTCN PAM
aaggaaauguucauuggaag

SEQ ID NO: 37271 - RNA, 20 nt, Artificial Sequence
  HTT spacer sequence TTCN PAM
uuugaacauaaugucagcac

SEQ ID NO: 37272 - RNA, 20 nt, Artificial Sequence
  HTT spacer sequence TTCN PAM
uuggaagguuucagauuuuc

SEQ ID NO: 37273 - RNA, 20 nt, Artificial Sequence
  HTT spacer sequence TTCN PAM
aaugaacauuuccuuugaac

SEQ ID NO: 37274 - RNA, 20 nt, Artificial Sequence
  HTT spacer sequence TTCN PAM
gauuuucggauuuagggagc

SEQ ID NO: 37275 - RNA, 20 nt, Artificial Sequence
  HTT spacer sequence TTCN PAM
gauuuagggagcucaacaaa

SEQ ID NO: 37276 - RNA, 20 nt, Artificial Sequence
  HTT spacer sequence TTCN PAM
aaaccugaaaaaaauccuaa

SEQ ID NO: 37277 - RNA, 20 nt, Artificial Sequence
  HTT spacer sequence TTCN PAM
gguuuugaaauaugugcauu

SEQ ID NO: 37278 - RNA, 20 nt, Artificial Sequence
  HTT spacer sequence TTCN PAM
gaauacuucugaucccaaac

SEQ ID NO: 37279 - RNA, 20 nt, Artificial Sequence
  HTT spacer sequence TTCN PAM
gaauuuaggauuuuuuucag

SEQ ID NO: 37280 - RNA, 20 nt, Artificial Sequence
  HTT spacer sequence TTCN PAM
gaucccaaacauuucagaua

SEQ ID NO: 37281 - RNA, 20 nt, Artificial Sequence
  HTT spacer sequence TTCN PAM
gauaaggguuauucaaccug

SEQ ID NO: 37282 - RNA, 20 nt, Artificial Sequence
  HTT spacer sequence TTCN PAM
accuguacugucagaugauc

SEQ ID NO: 37283 - RNA, 20 nt, Artificial Sequence
  HTT spacer sequence TTCN PAM
uuugggaucaucugacagua

SEQ ID NO: 37284 - RNA, 20 nt, Artificial Sequence
  HTT spacer sequence TTCN PAM
uugauauuugguuaacgauu

SEQ ID NO: 37285 - RNA, 20 nt, Artificial Sequence
  HTT spacer sequence TTCN PAM
gccuaggauuaugaaucaag

SEQ ID NO: 37286 - RNA, 20 nt, Artificial Sequence
  HTT spacer sequence TTCN PAM
uaauccuaggcagaaacugu

SEQ ID NO: 37287 - RNA, 20 nt, Artificial Sequence
  HTT spacer sequence TTCN PAM
ucuugauucauaauccuagg

SEQ ID NO: 37288 - RNA, 20 nt, Artificial Sequence
  HTT spacer sequence TTCN PAM
uauaaaucuuaaauaucuac

SEQ ID NO: 37289 - RNA, 20 nt, Artificial Sequence
  HTT spacer sequence TTCN PAM
uauuuuggauucaacaguuc

SEQ ID NO: 37290 - RNA, 20 nt, Artificial Sequence
  HTT spacer sequence TTCN PAM
acaguucugucaaaacugug

SEQ ID NO: 37291 - RNA, 20 nt, Artificial Sequence
  HTT spacer sequence TTCN PAM
gucaaaacuguggcagugau

SEQ ID NO: 37292 - RNA, 20 nt, Artificial Sequence
  HTT spacer sequence TTCN PAM
uuuuuucccacugaacuauc

SEQ ID NO: 37293 - RNA, 20 nt, Artificial Sequence
  HTT spacer sequence TTCN PAM
cacugaacuaucacaaaauu

SEQ ID NO: 37294 - RNA, 20 nt, Artificial Sequence
  HTT spacer sequence TTCN PAM
gugggaaaaaaagaaucccc

SEQ ID NO: 37295 - RNA, 20 nt, Artificial Sequence
  HTT spacer sequence TTCN PAM
aauuuugugauaguucagug

SEQ ID NO: 37296 - RNA, 20 nt, Artificial Sequence
  HTT spacer sequence TTCN PAM
ccaauuacucuuuuuccaau

SEQ ID NO: 37297 - RNA, 20 nt, Artificial Sequence
  HTT spacer sequence TTCN PAM
ggccggcuaagccagugggg

SEQ ID NO: 37298 - RNA, 20 nt, Artificial Sequence
  HTT spacer sequence TTCN PAM
ccagggggccuaacuucaca

SEQ ID NO: 37299 - RNA, 20 nt, Artificial Sequence
  HTT spacer sequence TTCN PAM
cacagccucugccgcagugc

SEQ ID NO: 37300 - RNA, 20 nt, Artificial Sequence
  HTT spacer sequence TTCN PAM
uaccuccucaauuauuugug

SEQ ID NO: 37301 - RNA, 20 nt, Artificial Sequence
  HTT spacer sequence TTCN PAM
ccuucuuacccuuucuggcc

SEQ ID NO: 37302 - RNA, 20 nt, Artificial Sequence
  HTT spacer sequence TTCN PAM
uacccuuucuggccuuucua

SEQ ID NO: 37303 - RNA, 20 nt, Artificial Sequence
  HTT spacer sequence TTCN PAM
ggccuuucuauggcauuaau

SEQ ID NO: 37304 - RNA, 20 nt, Artificial Sequence
  HTT spacer sequence TTCN PAM
auggcauuaauaccuggucu

SEQ ID NO: 37305 - RNA, 20 nt, Artificial Sequence
  HTT spacer sequence TTCN PAM
uguguacuugaaaaugaauc

SEQ ID NO: 37306 - RNA, 20 nt, Artificial Sequence
  HTT spacer sequence TTCN PAM
aguacacaagaagagaccag

SEQ ID NO: 37307 - RNA, 20 nt, Artificial Sequence
  HTT spacer sequence TTCN PAM
uuuucaaguacacaagaaga

SEQ ID NO: 37308 - RNA, 20 nt, Artificial Sequence
  HTT spacer sequence TTCN PAM
uuagugucagaaccuccaug

SEQ ID NO: 37309 - RNA, 20 nt, Artificial Sequence
  HTT spacer sequence TTCN PAM
gacacuaaggaaaaauauga

SEQ ID NO: 37310 - RNA, 20 nt, Artificial Sequence
  HTT spacer sequence TTCN PAM
agaucugaucagccuuuccc

SEQ ID NO: 37311 - RNA, 20 nt, Artificial Sequence
  HTT spacer sequence TTCN PAM
cacgagccuccaguacagga

SEQ ID NO: 37312 - RNA, 20 nt, Artificial Sequence
  HTT spacer sequence TTCN PAM
ucagugccguucaucggaac

SEQ ID NO: 37313 - RNA, 20 nt, Artificial Sequence
  HTT spacer sequence TTCN PAM
ucggaacucugcugccagcg

SEQ ID NO: 37314 - RNA, 20 nt, Artificial Sequence
  HTT spacer sequence TTCN PAM
gaugaacggcacugaugaag

SEQ ID NO: 37315 - RNA, 20 nt, Artificial Sequence
  HTT spacer sequence TTCN PAM
uccaggcaauucagucucgu

SEQ ID NO: 37316 - RNA, 20 nt, Artificial Sequence
  HTT spacer sequence TTCN PAM
gucucguugugaaaaccuuu

SEQ ID NO: 37317 - RNA, 20 nt, Artificial Sequence
  HTT spacer sequence TTCN PAM
caacgagacugaauugccug

SEQ ID NO: 37318 - RNA, 20 nt, Artificial Sequence
  HTT spacer sequence TTCN PAM
acuguacgucuucauccugc

SEQ ID NO: 37319 - RNA, 20 nt, Artificial Sequence
  HTT spacer sequence TTCN PAM
uccugccgacuauugccagu

SEQ ID NO: 37320 - RNA, 20 nt, Artificial Sequence
  HTT spacer sequence TTCN PAM
cugccuuaaaaauggaguau

SEQ ID NO: 37321 - RNA, 20 nt, Artificial Sequence
  HTT spacer sequence TTCN PAM
auacuccauuuuuaaggcag

SEQ ID NO: 37322 - RNA, 20 nt, Artificial Sequence
  HTT spacer sequence TTCN PAM
gauuugcaaaauagucaucu

SEQ ID NO: 37323 - RNA, 20 nt, Artificial Sequence
  HTT spacer sequence TTCN PAM
uuuccuucuugcuguuagcc

SEQ ID NO: 37324 - RNA, 20 nt, Artificial Sequence
  HTT spacer sequence TTCN PAM
uucuugcuguuagccaacca

SEQ ID NO: 37325 - RNA, 20 nt, Artificial Sequence
  HTT spacer sequence TTCN PAM
ugcuguuagccaaccaugcu

SEQ ID NO: 37326 - RNA, 20 nt, Artificial Sequence
  HTT spacer sequence TTCN PAM
gcaugguuggcuaacagcaa

SEQ ID NO: 37327 - RNA, 20 nt, Artificial Sequence
  HTT spacer sequence TTCN PAM
ucagcaugguuggcuaacag

SEQ ID NO: 37328 - RNA, 20 nt, Artificial Sequence
  HTT spacer sequence TTCN PAM
gugcuuggaggggauccauc

SEQ ID NO: 37329 - RNA, 20 nt, Artificial Sequence
  HTT spacer sequence TTCN PAM
gugcaccccuuuccgugugc

SEQ ID NO: 37330 - RNA, 20 nt, Artificial Sequence
  HTT spacer sequence TTCN PAM
gugugcuggcucgcaugguc

SEQ ID NO: 37331 - RNA, 20 nt, Artificial Sequence
  HTT spacer sequence TTCN PAM
acccggcgacaagcaaggau

SEQ ID NO: 37332 - RNA, 20 nt, Artificial Sequence
  HTT spacer sequence TTCN PAM
ggcugcaaauuuacagguau

SEQ ID NO: 37333 - RNA, 20 nt, Artificial Sequence
  HTT spacer sequence TTCN PAM
caauaccuguaaauuugcag

SEQ ID NO: 37334 - RNA, 20 nt, Artificial Sequence
  HTT spacer sequence TTCN PAM
cuucccaauaccuguaaauu

SEQ ID NO: 37335 - RNA, 20 nt, Artificial Sequence
  HTT spacer sequence TTCN PAM
auauaaaucaauaucagggu

SEQ ID NO: 37336 - RNA, 20 nt, Artificial Sequence
  HTT spacer sequence TTCN PAM
uccguaaguauggucuugac

SEQ ID NO: 37337 - RNA, 20 nt, Artificial Sequence
  HTT spacer sequence TTCN PAM
aucggugaccaugucaagac

SEQ ID NO: 37338 - RNA, 20 nt, Artificial Sequence
  HTT spacer sequence TTCN PAM
auguuucuaucggugaccau

SEQ ID NO: 37339 - RNA, 20 nt, Artificial Sequence
  HTT spacer sequence TTCN PAM
uguauuuuuuucuagucugc

SEQ ID NO: 37340 - RNA, 20 nt, Artificial Sequence
  HTT spacer sequence TTCN PAM
agucugcccuuacuaggaug

SEQ ID NO: 37341 - RNA, 20 nt, Artificial Sequence
  HTT spacer sequence TTCN PAM
uccuaguaagggcagacuag

SEQ ID NO: 37342 - RNA, 20 nt, Artificial Sequence
  HTT spacer sequence TTCN PAM
uccuuuuuaaaugagcauga

SEQ ID NO: 37343 - RNA, 20 nt, Artificial Sequence
  HTT spacer sequence TTCN PAM
auuggcaacugggccaugcu

SEQ ID NO: 37344 - RNA, 20 nt, Artificial Sequence
  HTT spacer sequence TTCN PAM
uccauuggcaacugggccau

SEQ ID NO: 37345 - RNA, 20 nt, Artificial Sequence
  HTT spacer sequence TTCN PAM
guugaguucuuccauuggca

SEQ ID NO: 37346 - RNA, 20 nt, Artificial Sequence
  HTT spacer sequence TTCN PAM
uggauucuguugaguucuuc

SEQ ID NO: 37347 - RNA, 20 nt, Artificial Sequence
  HTT spacer sequence TTCN PAM
gagcagcgggcucgcucaga

SEQ ID NO: 37348 - RNA, 20 nt, Artificial Sequence
  HTT spacer sequence TTCN PAM
agcauuaccucugagcgagc

SEQ ID NO: 37349 - RNA, 20 nt, Artificial Sequence
  HTT spacer sequence TTCN PAM
cguacaaaucuauauccuuu

SEQ ID NO: 37350 - RNA, 20 nt, Artificial Sequence
  HTT spacer sequence TTCN PAM
caggacaagaaaucgaugug

SEQ ID NO: 37351 - RNA, 20 nt, Artificial Sequence
  HTT spacer sequence TTCN PAM
uguccugugaauuuauuccc

SEQ ID NO: 37352 - RNA, 20 nt, Artificial Sequence
  HTT spacer sequence TTCN PAM
gcaguaaacccaccuauaag

SEQ ID NO: 37353 - RNA, 20 nt, Artificial Sequence
  HTT spacer sequence TTCN PAM
auuauggcacuucugcagua

SEQ ID NO: 37354 - RNA, 20 nt, Artificial Sequence
  HTT spacer sequence TTCN PAM
uacuuuuaaaacaaccagau

SEQ ID NO: 37355 - RNA, 20 nt, Artificial Sequence
  HTT spacer sequence TTCN PAM
aaagaguaaaggaugaccgg

SEQ ID NO: 37356 - RNA, 20 nt, Artificial Sequence
  HTT spacer sequence TTCN PAM
aaaugcuaccucucaaacag

SEQ ID NO: 37357 - RNA, 20 nt, Artificial Sequence
  HTT spacer sequence TTCN PAM
cuguccugugaugaguggga

SEQ ID NO: 37358 - RNA, 20 nt, Artificial Sequence
  HTT spacer sequence TTCN PAM
cacucaucacaggacaguga

SEQ ID NO: 37359 - RNA, 20 nt, Artificial Sequence
  HTT spacer sequence TTCN PAM
aagcauuuaaucauuuaguu

SEQ ID NO: 37360 - RNA, 20 nt, Artificial Sequence
  HTT spacer sequence TTCN PAM
caaagacuuugcaaacacaa

SEQ ID NO: 37361 - RNA, 20 nt, Artificial Sequence
  HTT spacer sequence TTCN PAM
gacaaaggcuucucaaagac

SEQ ID NO: 37362 - RNA, 20 nt, Artificial Sequence
  HTT spacer sequence TTCN PAM
augacugcagaauaaguuaa

SEQ ID NO: 37363 - RNA, 20 nt, Artificial Sequence
  HTT spacer sequence TTCN PAM
gcagucauggaaauacacuc

SEQ ID NO: 37364 - RNA, 20 nt, Artificial Sequence
  HTT spacer sequence TTCN PAM
uucccuugcggggcggggug

SEQ ID NO: 37365 - RNA, 20 nt, Artificial Sequence
  HTT spacer sequence TTCN PAM
cuugcggggcgggguggggg

SEQ ID NO: 37366 - RNA, 20 nt, Artificial Sequence
  HTT spacer sequence TTCN PAM
cugcugucucucucucccuc

SEQ ID NO: 37367 - RNA, 20 nt, Artificial Sequence
  HTT spacer sequence TTCN PAM
ccuucucugcugucucucuc

SEQ ID NO: 37368 - RNA, 20 nt, Artificial Sequence
  HTT spacer sequence TTCN PAM
gcucaaaguacacagcauga

SEQ ID NO: 37369 - RNA, 20 nt, Artificial Sequence
  HTT spacer sequence TTCN PAM
uuuuuugcaguuucagcuca

SEQ ID NO: 37370 - RNA, 20 nt, Artificial Sequence
  HTT spacer sequence TTCN PAM
gucuuuagaguaccuugucu

SEQ ID NO: 37371 - RNA, 20 nt, Artificial Sequence
  HTT spacer sequence TTCN PAM
gucuuuagaguaccuuguug

SEQ ID NO: 37372 - RNA, 20 nt, Artificial Sequence
  HTT spacer sequence TTCN PAM
gucuguagggccaagcucuu

SEQ ID NO: 37373 - RNA, 20 nt, Artificial Sequence
  HTT spacer sequence TTCN PAM
uaaugcaaauuacaaaagag

SEQ ID NO: 37374 - RNA, 20 nt, Artificial Sequence
  HTT spacer sequence TTCN PAM
guccagaugagggagauuaa

SEQ ID NO: 37375 - RNA, 20 nt, Artificial Sequence
  HTT spacer sequence TTCN PAM
aaauaaaaucaccucaucug

SEQ ID NO: 37376 - RNA, 20 nt, Artificial Sequence
  HTT spacer sequence TTCN PAM
uggucauuucaaaauaaaau

SEQ ID NO: 37377 - RNA, 20 nt, Artificial Sequence
  HTT spacer sequence TTCN PAM
uaucaguugucuuacuggga

SEQ ID NO: 37378 - RNA, 20 nt, Artificial Sequence
  HTT spacer sequence TTCN PAM
acuaucaaauaucccaguaa

SEQ ID NO: 37379 - RNA, 20 nt, Artificial Sequence
  HTT spacer sequence TTCN PAM
uaauaaauguaaaacagauc

SEQ ID NO: 37380 - RNA, 20 nt, Artificial Sequence
  HTT spacer sequence TTCN PAM
uuuauacucaaacacugcaa

SEQ ID NO: 37381 - RNA, 20 nt, Artificial Sequence
  HTT spacer sequence TTCN PAM
ggaaaauauuaauggaguac

SEQ ID NO: 37382 - RNA, 20 nt, Artificial Sequence
  HTT spacer sequence TTCN PAM
agaaauuucauuuauacuca

SEQ ID NO: 37383 - RNA, 20 nt, Artificial Sequence
  HTT spacer sequence TTCN PAM
caucaauacucaaacagguc

SEQ ID NO: 37384 - RNA, 20 nt, Artificial Sequence
  HTT spacer sequence TTCN PAM
cagcuaucuucucaucaaua

SEQ ID NO: 37385 - RNA, 20 nt, Artificial Sequence
  HTT spacer sequence TTCN PAM
ucacagcuaucuucucauca

SEQ ID NO: 37386 - RNA, 20 nt, Artificial Sequence
  HTT spacer sequence TTCN PAM
uuuaagaagccacuaauagu

SEQ ID NO: 37387 - RNA, 20 nt, Artificial Sequence
  HTT spacer sequence TTCN PAM
uaaaggaaaauacacuuguu

SEQ ID NO: 37388 - RNA, 20 nt, Artificial Sequence
  HTT spacer sequence TTCN PAM
agaauccuagugugcagagu

SEQ ID NO: 37389 - RNA, 20 nt, Artificial Sequence
  HTT spacer sequence TTCN PAM
agaaauauacacucuaagga

SEQ ID NO: 37390 - RNA, 20 nt, Artificial Sequence
  HTT spacer sequence TTCN PAM
uuuuuauuuguauuuuagac

SEQ ID NO: 37391 - RNA, 20 nt, Artificial Sequence
  HTT spacer sequence TTCN PAM
cugcuggacagguuucgucu

SEQ ID NO: 37392 - RNA, 20 nt, Artificial Sequence
  HTT spacer sequence TTCN PAM
ucucuccaccaugcaagacu

SEQ ID NO: 37393 - RNA, 20 nt, Artificial Sequence
  HTT spacer sequence TTCN PAM
cacccgcuggacggggaugg

SEQ ID NO: 37394 - RNA, 20 nt, Artificial Sequence
  HTT spacer sequence TTCN PAM
agugacacgugcccaucccc

SEQ ID NO: 37395 - RNA, 20 nt, Artificial Sequence
  HTT spacer sequence TTCN PAM
ggcgcucggcucggcucagu

SEQ ID NO: 37396 - RNA, 20 nt, Artificial Sequence
  HTT spacer sequence TTCN PAM
cugagccgagccgagcgcca

SEQ ID NO: 37397 - RNA, 20 nt, Artificial Sequence
  HTT spacer sequence TTCN PAM
cccacuaacuacucacccca

SEQ ID NO: 37398 - RNA, 20 nt, Artificial Sequence
  HTT spacer sequence TTCN PAM
uugauucacccacuaacuac

SEQ ID NO: 37399 - RNA, 20 nt, Artificial Sequence
  HTT spacer sequence TTCN PAM
agcacaugucaaugccguua

SEQ ID NO: 37400 - RNA, 20 nt, Artificial Sequence
  HTT spacer sequence TTCN PAM
ggccaccugugaguugcacu

SEQ ID NO: 37401 - RNA, 20 nt, Artificial Sequence
  HTT spacer sequence TTCN PAM
gguauguugucagcaccucc

SEQ ID NO: 37402 - RNA, 20 nt, Artificial Sequence
  HTT spacer sequence TTCN PAM
uggacaaaguucagcuuaug

SEQ ID NO: 37403 - RNA, 20 nt, Artificial Sequence
  HTT spacer sequence TTCN PAM
gcuuaugaauaugaauuuag

SEQ ID NO: 37404 - RNA, 20 nt, Artificial Sequence
  HTT spacer sequence TTCN PAM
uaagcugaacuuuguccagg

SEQ ID NO: 37405 - RNA, 20 nt, Artificial Sequence
  HTT spacer sequence TTCN PAM
uauucauaagcugaacuuug

SEQ ID NO: 37406 - RNA, 20 nt, Artificial Sequence
  HTT spacer sequence TTCN PAM
aaaaccagcagcccaaguau

SEQ ID NO: 37407 - RNA, 20 nt, Artificial Sequence
  HTT spacer sequence TTCN PAM
uauacuugggcugcugguuu

SEQ ID NO: 37408 - RNA, 20 nt, Artificial Sequence
  HTT spacer sequence TTCN PAM
cuuucuuauacuugggcugc

SEQ ID NO: 37409 - RNA, 20 nt, Artificial Sequence
  HTT spacer sequence TTCN PAM
guccugccuucuuaggcucu

SEQ ID NO: 37410 - RNA, 20 nt, Artificial Sequence
  HTT spacer sequence TTCN PAM
uaggcucuauucgcuaagca

SEQ ID NO: 37411 - RNA, 20 nt, Artificial Sequence
  HTT spacer sequence TTCN PAM
cuaagcaccugcccugcccu

SEQ ID NO: 37412 - RNA, 20 nt, Artificial Sequence
  HTT spacer sequence TTCN PAM
aaauauagcuaaaccacuaa

SEQ ID NO: 37413 - RNA, 20 nt, Artificial Sequence
  HTT spacer sequence TTCN PAM
aauaggccuuccaaauauag

SEQ ID NO: 37414 - RNA, 20 nt, Artificial Sequence
  HTT spacer sequence TTCN PAM
ccaggugaagggggaggcug

SEQ ID NO: 37415 - RNA, 20 nt, Artificial Sequence
  HTT spacer sequence TTCN PAM
ccuggugaacuuccaauagg

SEQ ID NO: 37416 - RNA, 20 nt, Artificial Sequence
  HTT spacer sequence TTCN PAM
guuaccugccugggcacccu

SEQ ID NO: 37417 - RNA, 20 nt, Artificial Sequence
  HTT spacer sequence TTCN PAM
ccuuuggacuucuguuaccu

SEQ ID NO: 37418 - RNA, 20 nt, Artificial Sequence
  HTT spacer sequence TTCN PAM
caagcacuggccuaggccug

SEQ ID NO: 37419 - RNA, 20 nt, Artificial Sequence
  HTT spacer sequence TTCN PAM
caucccuggagcuacaggcc

SEQ ID NO: 37420 - RNA, 20 nt, Artificial Sequence
  HTT spacer sequence TTCN PAM
aggggacuucacaucccugg

SEQ ID NO: 37421 - RNA, 20 nt, Artificial Sequence
  HTT spacer sequence TTCN PAM
ccuuauccauuuuuuucuuc

SEQ ID NO: 37422 - RNA, 20 nt, Artificial Sequence
  HTT spacer sequence TTCN PAM
ucccaggacugguacguuca

SEQ ID NO: 37423 - RNA, 20 nt, Artificial Sequence
  HTT spacer sequence TTCN PAM
caggacugguacguucaucu

SEQ ID NO: 37424 - RNA, 20 nt, Artificial Sequence
  HTT spacer sequence TTCN PAM
ucuugucaaaucccaguguu

SEQ ID NO: 37425 - RNA, 20 nt, Artificial Sequence
  HTT spacer sequence TTCN PAM
gcacugcuggaaggugcaga

SEQ ID NO: 37426 - RNA, 20 nt, Artificial Sequence
  HTT spacer sequence TTCN PAM
agcagugcagaaucugaccu

SEQ ID NO: 37427 - RNA, 20 nt, Artificial Sequence
  HTT spacer sequence TTCN PAM
ccagcucugcaccuuccagc

SEQ ID NO: 37428 - RNA, 20 nt, Artificial Sequence
  HTT spacer sequence TTCN PAM
ugcugaagauaugaaugccu

SEQ ID NO: 37429 - RNA, 20 nt, Artificial Sequence
  HTT spacer sequence TTCN PAM
gcaggaauccgauucaccag

SEQ ID NO: 37430 - RNA, 20 nt, Artificial Sequence
  HTT spacer sequence TTCN PAM
uaucuucagcaggaauccga

SEQ ID NO: 37431 - RNA, 20 nt, Artificial Sequence
  HTT spacer sequence TTCN PAM
ugaugaacucgguacggggg

SEQ ID NO: 37432 - RNA, 20 nt, Artificial Sequence
  HTT spacer sequence TTCN PAM
ucaugaaggcauucauaucu

SEQ ID NO: 37433 - RNA, 20 nt, Artificial Sequence
  HTT spacer sequence TTCN PAM
uugccuccacugcucccccc

SEQ ID NO: 37434 - RNA, 20 nt, Artificial Sequence
  HTT spacer sequence TTCN PAM
ugugacuuccaagugggauu

SEQ ID NO: 37435 - RNA, 20 nt, Artificial Sequence
  HTT spacer sequence TTCN PAM
aagugggauuugucucauca

SEQ ID NO: 37436 - RNA, 20 nt, Artificial Sequence
  HTT spacer sequence TTCN PAM
gaguggagucucuccgacau

SEQ ID NO: 37437 - RNA, 20 nt, Artificial Sequence
  HTT spacer sequence TTCN PAM
cggccccauucagaguggag

SEQ ID NO: 37438 - RNA, 20 nt, Artificial Sequence
  HTT spacer sequence TTCN PAM
gauggggucgggacaugggg

SEQ ID NO: 37439 - RNA, 20 nt, Artificial Sequence
  HTT spacer sequence TTCN PAM
gucucgaucagcauaacccc

SEQ ID NO: 37440 - RNA, 20 nt, Artificial Sequence
  HTT spacer sequence TTCN PAM
gccacauuagaauccacgga

SEQ ID NO: 37441 - RNA, 20 nt, Artificial Sequence
  HTT spacer sequence TTCN PAM
aauguggcugaaacaaugug

SEQ ID NO: 37442 - RNA, 20 nt, Artificial Sequence
  HTT spacer sequence TTCN PAM
aaacaacaccuccguggauu

SEQ ID NO: 37443 - RNA, 20 nt, Artificial Sequence
  HTT spacer sequence TTCN PAM
caucccaaaccauacaccca

SEQ ID NO: 37444 - RNA, 20 nt, Artificial Sequence
  HTT spacer sequence TTCN PAM
uccaguggaggccagauagu

SEQ ID NO: 37445 - RNA, 20 nt, Artificial Sequence
  HTT spacer sequence TTCN PAM
gucuuggccauggagcuuag

SEQ ID NO: 37446 - RNA, 20 nt, Artificial Sequence
  HTT spacer sequence TTCN PAM
auucugucuuggccauggag

SEQ ID NO: 37447 - RNA, 20 nt, Artificial Sequence
  HTT spacer sequence TTCN PAM
acacagugucguaaugcgug

SEQ ID NO: 37448 - RNA, 20 nt, Artificial Sequence
  HTT spacer sequence TTCN PAM
agugucuuggaaguugaucu

SEQ ID NO: 37449 - RNA, 20 nt, Artificial Sequence
  HTT spacer sequence TTCN PAM
aagacacuagaaacaaguua

SEQ ID NO: 37450 - RNA, 20 nt, Artificial Sequence
  HTT spacer sequence TTCN PAM
ucuacucacaccucuguuag

SEQ ID NO: 37451 - RNA, 20 nt, Artificial Sequence
  HTT spacer sequence TTCN PAM
ucaccccccaaccccagaug

SEQ ID NO: 37452 - RNA, 20 nt, Artificial Sequence
  HTT spacer sequence TTCN PAM
ccccccaaccccagauguca

SEQ ID NO: 37453 - RNA, 20 nt, Artificial Sequence
  HTT spacer sequence TTCN PAM
ucucagaccuacuaggacgg

SEQ ID NO: 37454 - RNA, 20 nt, Artificial Sequence
  HTT spacer sequence TTCN PAM
cagaccuacuaggacgggag

SEQ ID NO: 37455 - RNA, 20 nt, Artificial Sequence
  HTT spacer sequence TTCN PAM
cccguccuaguaggucugag

SEQ ID NO: 37456 - RNA, 20 nt, Artificial Sequence
  HTT spacer sequence TTCN PAM
cucccauuugcugcauauca

SEQ ID NO: 37457 - RNA, 20 nt, Artificial Sequence
  HTT spacer sequence TTCN PAM
ugaaaagagaccuugugggg

SEQ ID NO: 37458 - RNA, 20 nt, Artificial Sequence
  HTT spacer sequence TTCN PAM
ugaacaccugccgucacucc

SEQ ID NO: 37459 - RNA, 20 nt, Artificial Sequence
  HTT spacer sequence TTCN PAM
gauguacugaagagcucaac

SEQ ID NO: 37460 - RNA, 20 nt, Artificial Sequence
  HTT spacer sequence TTCN PAM
guacaucagaacacacuguu

SEQ ID NO: 37461 - RNA, 20 nt, Artificial Sequence
  HTT spacer sequence TTCN PAM
guugagcucuucaguacauc

SEQ ID NO: 37462 - RNA, 20 nt, Artificial Sequence
  HTT spacer sequence TTCN PAM
ccuguuguuuucaguugagc

SEQ ID NO: 37463 - RNA, 20 nt, Artificial Sequence
  HTT spacer sequence TTCN PAM
uacgauucuccugccucagc

SEQ ID NO: 37464 - RNA, 20 nt, Artificial Sequence
  HTT spacer sequence TTCN PAM
ccugccucagccucccaaau

SEQ ID NO: 37465 - RNA, 20 nt, Artificial Sequence
  HTT spacer sequence TTCN PAM
ccauguuggccaggcugguc

SEQ ID NO: 37466 - RNA, 20 nt, Artificial Sequence
  HTT spacer sequence TTCN PAM
ugcagugaaagcuaacuuac

SEQ ID NO: 37467 - RNA, 20 nt, Artificial Sequence
  HTT spacer sequence TTCN PAM
cugcaugaaucuuaagauaa

SEQ ID NO: 37468 - RNA, 20 nt, Artificial Sequence
  HTT spacer sequence TTCN PAM
aaauuugcuaauugggcuuu

SEQ ID NO: 37469 - RNA, 20 nt, Artificial Sequence
  HTT spacer sequence TTCN PAM
aagcccaauuagcaaauuug

SEQ ID NO: 37470 - RNA, 20 nt, Artificial Sequence
  HTT spacer sequence TTCN PAM
gacuguaaaagaaagcuuca

SEQ ID NO: 37471 - RNA, 20 nt, Artificial Sequence
  HTT spacer sequence TTCN PAM
uuuacagucagaacuuuuac

SEQ ID NO: 37472 - RNA, 20 nt, Artificial Sequence
  HTT spacer sequence TTCN PAM
acuuuuggcauucaugaugc

SEQ ID NO: 37473 - RNA, 20 nt, Artificial Sequence
  HTT spacer sequence TTCN PAM
ugaugcuuuucugaguauua

SEQ ID NO: 37474 - RNA, 20 nt, Artificial Sequence
  HTT spacer sequence TTCN PAM
gaguauuaaacuaagauaga

SEQ ID NO: 37475 - RNA, 20 nt, Artificial Sequence
  HTT spacer sequence TTCN PAM
gguaaaacaucuaucuuagu

SEQ ID NO: 37476 - RNA, 20 nt, Artificial Sequence
  HTT spacer sequence TTCN PAM
uaugucaauuuggauuaugu

SEQ ID NO: 37477 - RNA, 20 nt, Artificial Sequence
  HTT spacer sequence TTCN PAM
aaccaaaauuuuggcauuca

SEQ ID NO: 37478 - RNA, 20 nt, Artificial Sequence
  HTT spacer sequence TTCN PAM
uauggcuacuuuuacguauu

SEQ ID NO: 37479 - RNA, 20 nt, Artificial Sequence
  HTT spacer sequence TTCN PAM
gcugcauuugaacaucuuuu

SEQ ID NO: 37480 - RNA, 20 nt, Artificial Sequence
  HTT spacer sequence TTCN PAM
aaugcagcugaaauacguaa

SEQ ID NO: 37481 - RNA, 20 nt, Artificial Sequence
  HTT spacer sequence TTCN PAM
aacuuuagggugguuggugu

SEQ ID NO: 37482 - RNA, 20 nt, Artificial Sequence
  HTT spacer sequence TTCN PAM
uaaaaacaaaaucaaagcua

SEQ ID NO: 37483 - RNA, 20 nt, Artificial Sequence
  HTT spacer sequence TTCN PAM
agcaaauccaagagcauaaa

SEQ ID NO: 37484 - RNA, 20 nt, Artificial Sequence
  HTT spacer sequence TTCN PAM
cucuuaguauuuuaaguaau

SEQ ID NO: 37485 - RNA, 20 nt, Artificial Sequence
  HTT spacer sequence TTCN PAM
acauaugcuuaguaaaauau

SEQ ID NO: 37486 - RNA, 20 nt, Artificial Sequence
  HTT spacer sequence TTCN PAM
uucaacauaugcuuaguaaa

SEQ ID NO: 37487 - RNA, 20 nt, Artificial Sequence
  HTT spacer sequence TTCN PAM
aauauuuauaacaggcauag

SEQ ID NO: 37488 - RNA, 20 nt, Artificial Sequence
  HTT spacer sequence TTCN PAM
acucuaugccuguuauaaau

SEQ ID NO: 37489 - RNA, 20 nt, Artificial Sequence
  HTT spacer sequence TTCN PAM
uaaaaauauuuuugauggua

SEQ ID NO: 37490 - RNA, 20 nt, Artificial Sequence
  HTT spacer sequence TTCN PAM
cagaaacauuugccuuauuc

SEQ ID NO: 37491 - RNA, 20 nt, Artificial Sequence
  HTT spacer sequence TTCN PAM
gagaaaauacaaauugguau

SEQ ID NO: 37492 - RNA, 20 nt, Artificial Sequence
  HTT spacer sequence TTCN PAM
uuuuucuguuguguuuuucu

SEQ ID NO: 37493 - RNA, 20 nt, Artificial Sequence
  HTT spacer sequence TTCN PAM
guuguguuuuucuuaccuga

SEQ ID NO: 37494 - RNA, 20 nt, Artificial Sequence
  HTT spacer sequence TTCN PAM
uaccugauugaaagcucaua

SEQ ID NO: 37495 - RNA, 20 nt, Artificial Sequence
  HTT spacer sequence TTCN PAM
aucagguaagaaaaacacaa

SEQ ID NO: 37496 - RNA, 20 nt, Artificial Sequence
  HTT spacer sequence TTCN PAM
ggaguucaaccuaagccugc

SEQ ID NO: 37497 - RNA, 20 nt, Artificial Sequence
  HTT spacer sequence TTCN PAM
accuaagccugcuagcucca

SEQ ID NO: 37498 - RNA, 20 nt, Artificial Sequence
  HTT spacer sequence TTCN PAM
cucaucccuaggcuuaagca

SEQ ID NO: 37499 - RNA, 20 nt, Artificial Sequence
  HTT spacer sequence TTCN PAM
gguggccagaagagugcccu

SEQ ID NO: 37500 - RNA, 20 nt, Artificial Sequence
  HTT spacer sequence TTCN PAM
ggccaccagaaauuucacuc

SEQ ID NO: 37501 - RNA, 20 nt, Artificial Sequence
  HTT spacer sequence TTCN PAM
aaaagggcacucuucuggcc

SEQ ID NO: 37502 - RNA, 20 nt, Artificial Sequence
  HTT spacer sequence TTCN PAM
agcccgagcugccugcagag

SEQ ID NO: 37503 - RNA, 20 nt, Artificial Sequence
  HTT spacer sequence TTCN PAM
acuugcuccaguaggccgcc

SEQ ID NO: 37504 - RNA, 20 nt, Artificial Sequence
  HTT spacer sequence TTCN PAM
agggccaguauaguacuuug

SEQ ID NO: 37505 - RNA, 20 nt, Artificial Sequence
  HTT spacer sequence TTCN PAM
auguauuagauccacugccu

SEQ ID NO: 37506 - RNA, 20 nt, Artificial Sequence
  HTT spacer sequence TTCN PAM
gagccgaggacacccgugcu

SEQ ID NO: 37507 - RNA, 20 nt, Artificial Sequence
  HTT spacer sequence TTCN PAM
uccuguguguuugccacuuu

SEQ ID NO: 37508 - RNA, 20 nt, Artificial Sequence
  HTT spacer sequence TTCN PAM
uguguguuugccacuuugcc

SEQ ID NO: 37509 - RNA, 20 nt, Artificial Sequence
  HTT spacer sequence TTCN PAM
uugacauggucauggacaua

SEQ ID NO: 37510 - RNA, 20 nt, Artificial Sequence
  HTT spacer sequence TTCN PAM
ucaagggcuuagagcccuau

SEQ ID NO: 37511 - RNA, 20 nt, Artificial Sequence
  HTT spacer sequence TTCN PAM
ucaguggcacaucuacacau

SEQ ID NO: 37512 - RNA, 20 nt, Artificial Sequence
  HTT spacer sequence TTCN PAM
ucagauucucagagaauugc

SEQ ID NO: 37513 - RNA, 20 nt, Artificial Sequence
  HTT spacer sequence TTCN PAM
cagagaauugcuugacugcc

SEQ ID NO: 37514 - RNA, 20 nt, Artificial Sequence
  HTT spacer sequence TTCN PAM
cugagaaucugaugaaagcu

SEQ ID NO: 37515 - RNA, 20 nt, Artificial Sequence
  HTT spacer sequence TTCN PAM
aaguugaugcaucugugcuc

SEQ ID NO: 37516 - RNA, 20 nt, Artificial Sequence
  HTT spacer sequence TTCN PAM
aaaggcagucaagcaauucu

SEQ ID NO: 37517 - RNA, 20 nt, Artificial Sequence
  HTT spacer sequence TTCN PAM
guuucaggggaugcugcacu

SEQ ID NO: 37518 - RNA, 20 nt, Artificial Sequence
  HTT spacer sequence TTCN PAM
ggggaugcugcacuguauca

SEQ ID NO: 37519 - RNA, 20 nt, Artificial Sequence
  HTT spacer sequence TTCN PAM
uccugagaaagagaaggaca

SEQ ID NO: 37520 - RNA, 20 nt, Artificial Sequence
  HTT spacer sequence TTCN PAM
caggaggaaggugcaaauga

SEQ ID NO: 37521 - RNA, 20 nt, Artificial Sequence
  HTT spacer sequence TTCN PAM
cuuucucaggaggaaggugc

SEQ ID NO: 37522 - RNA, 20 nt, Artificial Sequence
  HTT spacer sequence TTCN PAM
caauguccuucucuuucuca

SEQ ID NO: 37523 - RNA, 20 nt, Artificial Sequence
  HTT spacer sequence TTCN PAM
ugguggcaacccuugaggua

SEQ ID NO: 37524 - RNA, 20 nt, Artificial Sequence
  HTT spacer sequence TTCN PAM
gugucagccccaugcccccu

SEQ ID NO: 37525 - RNA, 20 nt, Artificial Sequence
  HTT spacer sequence TTCN PAM
aauaaaacugcuuuacccuc

SEQ ID NO: 37526 - RNA, 20 nt, Artificial Sequence
  HTT spacer sequence TTCN PAM
aucucagccuggcaguaagu

SEQ ID NO: 37527 - RNA, 20 nt, Artificial Sequence
  HTT spacer sequence TTCN PAM
cccucaccucgccacuccuc

SEQ ID NO: 37528 - RNA, 20 nt, Artificial Sequence
  HTT spacer sequence TTCN PAM
caucugcaccuaccauguua

SEQ ID NO: 37529 - RNA, 20 nt, Artificial Sequence
  HTT spacer sequence TTCN PAM
ugucucuaaaauuaggaucc

SEQ ID NO: 37530 - RNA, 20 nt, Artificial Sequence
  HTT spacer sequence TTCN PAM
agaugauuauuuuucauguc

SEQ ID NO: 37531 - RNA, 20 nt, Artificial Sequence
  HTT spacer sequence TTCN PAM
uuggcugacauguccaggcc

SEQ ID NO: 37532 - RNA, 20 nt, Artificial Sequence
  HTT spacer sequence TTCN PAM
cccccagaauguguacacgu

SEQ ID NO: 37533 - RNA, 20 nt, Artificial Sequence
  HTT spacer sequence TTCN PAM
gggggcgaauuacaagcacu

SEQ ID NO: 37534 - RNA, 20 nt, Artificial Sequence
  HTT spacer sequence TTCN PAM
ggaugcauuaaagucuggcc

SEQ ID NO: 37535 - RNA, 20 nt, Artificial Sequence
  HTT spacer sequence TTCN PAM
uuggugugagguggaggcgg

SEQ ID NO: 37536 - RNA, 20 nt, Artificial Sequence
  HTT spacer sequence TTCN PAM
gaaccacguggagucauaug

SEQ ID NO: 37537 - RNA, 20 nt, Artificial Sequence
  HTT spacer sequence TTCN PAM
gaauaaggguguauuuauca

SEQ ID NO: 37538 - RNA, 20 nt, Artificial Sequence
  HTT spacer sequence TTCN PAM
gguuucagcuuaguggggaa

SEQ ID NO: 37539 - RNA, 20 nt, Artificial Sequence
  HTT spacer sequence TTCN PAM
gcuuaguggggaagugggaa

SEQ ID NO: 37540 - RNA, 20 nt, Artificial Sequence
  HTT spacer sequence TTCN PAM
ccacuaagcugaaaccugaa

SEQ ID NO: 37541 - RNA, 20 nt, Artificial Sequence
  HTT spacer sequence TTCN PAM
cacuuccccacuaagcugaa

SEQ ID NO: 37542 - RNA, 20 nt, Artificial Sequence
  HTT spacer sequence TTCN PAM
uccugcauacagcaggcaca

SEQ ID NO: 37543 - RNA, 20 nt, Artificial Sequence
  HTT spacer sequence TTCN PAM
ucaccugucaaaugggagua

SEQ ID NO: 37544 - RNA, 20 nt, Artificial Sequence
  HTT spacer sequence TTCN PAM
cuaagccuugcuuuccucac

SEQ ID NO: 37545 - RNA, 20 nt, Artificial Sequence
  HTT spacer sequence TTCN PAM
gugacuugcccagguccucu

SEQ ID NO: 37546 - RNA, 20 nt, Artificial Sequence
  HTT spacer sequence TTCN PAM
uagcucagaggaccugggca

SEQ ID NO: 37547 - RNA, 20 nt, Artificial Sequence
  HTT spacer sequence TTCN PAM
ggcauuugaacccaaggccu

SEQ ID NO: 37548 - RNA, 20 nt, Artificial Sequence
  HTT spacer sequence TTCN PAM
aaugccagaauggcuacuuc

SEQ ID NO: 37549 - RNA, 20 nt, Artificial Sequence
  HTT spacer sequence TTCN PAM
agggauagcaggccuugggu

SEQ ID NO: 37550 - RNA, 20 nt, Artificial Sequence
  HTT spacer sequence TTCN PAM
accuaugacagaggcaagcc

SEQ ID NO: 37551 - RNA, 20 nt, Artificial Sequence
  HTT spacer sequence TTCN PAM
uuggggcucccacagcacca

SEQ ID NO: 37552 - RNA, 20 nt, Artificial Sequence
  HTT spacer sequence TTCN PAM
acaggagcccacagcgcuga

SEQ ID NO: 37553 - RNA, 20 nt, Artificial Sequence
  HTT spacer sequence TTCN PAM
gcgcugugggcuccuguaga

SEQ ID NO: 37554 - RNA, 20 nt, Artificial Sequence
  HTT spacer sequence TTCN PAM
ccaaagugccaguccccucu

SEQ ID NO: 37555 - RNA, 20 nt, Artificial Sequence
  HTT spacer sequence TTCN PAM
guccugacccaccuauuccc

SEQ ID NO: 37556 - RNA, 20 nt, Artificial Sequence
  HTT spacer sequence TTCN PAM
ggaagggcaagggcaccugg

SEQ ID NO: 37557 - RNA, 20 nt, Artificial Sequence
  HTT spacer sequence TTCN PAM
agaaggacagcucugacaug

SEQ ID NO: 37558 - RNA, 20 nt, Artificial Sequence
  HTT spacer sequence TTCN PAM
acaacugugauucacacggc

SEQ ID NO: 37559 - RNA, 20 nt, Artificial Sequence
  HTT spacer sequence TTCN PAM
cacggcuuccccaaacgaag

SEQ ID NO: 37560 - RNA, 20 nt, Artificial Sequence
  HTT spacer sequence TTCN PAM
ccaaacgaagguacacgagu

SEQ ID NO: 37561 - RNA, 20 nt, Artificial Sequence
  HTT spacer sequence TTCN PAM
uuuggggaagccgugugaau

SEQ ID NO: 37562 - RNA, 20 nt, Artificial Sequence
  HTT spacer sequence TTCN PAM
gugacucgguacuucccuuu

SEQ ID NO: 37563 - RNA, 20 nt, Artificial Sequence
  HTT spacer sequence TTCN PAM
cuuuaggcccuguccuggca

SEQ ID NO: 37564 - RNA, 20 nt, Artificial Sequence
  HTT spacer sequence TTCN PAM
uccuggaggccggugagucc

SEQ ID NO: 37565 - RNA, 20 nt, Artificial Sequence
  HTT spacer sequence TTCN PAM
uggacggggacucaccggcc

SEQ ID NO: 37566 - RNA, 20 nt, Artificial Sequence
  HTT spacer sequence TTCN PAM
uaucauaguuccugucugcu

SEQ ID NO: 37567 - RNA, 20 nt, Artificial Sequence
  HTT spacer sequence TTCN PAM
ugucugcuucaccauguuuu

SEQ ID NO: 37568 - RNA, 20 nt, Artificial Sequence
  HTT spacer sequence TTCN PAM
ccauguuuuuauuuugugcu

SEQ ID NO: 37569 - RNA, 20 nt, Artificial Sequence
  HTT spacer sequence TTCN PAM
uagcuuaguaccuggcaaac

SEQ ID NO: 37570 - RNA, 20 nt, Artificial Sequence
  HTT spacer sequence TTCN PAM
ugaugcauauuuuaucuacc

SEQ ID NO: 37571 - RNA, 20 nt, Artificial Sequence
  HTT spacer sequence TTCN PAM
aguguagacuccaauauauu

SEQ ID NO: 37572 - RNA, 20 nt, Artificial Sequence
  HTT spacer sequence TTCN PAM
aguuaaauuccaguguagac

SEQ ID NO: 37573 - RNA, 20 nt, Artificial Sequence
  HTT spacer sequence TTCN PAM
aaaucuaaauaaaaugacua

SEQ ID NO: 37574 - RNA, 20 nt, Artificial Sequence
  HTT spacer sequence TTCN PAM
gcuuucaucaaaaauaccuc

SEQ ID NO: 37575 - RNA, 20 nt, Artificial Sequence
  HTT spacer sequence TTCN PAM
ucaaaaauaccucuaaacuu

SEQ ID NO: 37576 - RNA, 20 nt, Artificial Sequence
  HTT spacer sequence TTCN PAM
gaagauuauuuguuuucugu

SEQ ID NO: 37577 - RNA, 20 nt, Artificial Sequence
  HTT spacer sequence TTCN PAM
gaauguaauguuauuaaucu

SEQ ID NO: 37578 - RNA, 20 nt, Artificial Sequence
  HTT spacer sequence TTCN PAM
gucagaguuaaaauguuugu

SEQ ID NO: 37579 - RNA, 20 nt, Artificial Sequence
  HTT spacer sequence TTCN PAM
uuucaaggaacaguauccuc

SEQ ID NO: 37580 - RNA, 20 nt, Artificial Sequence
  HTT spacer sequence TTCN PAM
aggaacaguauccucaacaa

SEQ ID NO: 37581 - RNA, 20 nt, Artificial Sequence
  HTT spacer sequence TTCN PAM
uugaaaagaacaagccacuu

SEQ ID NO: 37582 - RNA, 20 nt, Artificial Sequence
  HTT spacer sequence TTCN PAM
aaacgcccucuaacauguaa

SEQ ID NO: 37583 - RNA, 20 nt, Artificial Sequence
  HTT spacer sequence TTCN PAM
uguuucauaauuguuuucau

SEQ ID NO: 37584 - RNA, 20 nt, Artificial Sequence
  HTT spacer sequence TTCN PAM
uaauuguuuucaucugugca

SEQ ID NO: 37585 - RNA, 20 nt, Artificial Sequence
  HTT spacer sequence TTCN PAM
ucugugcauuuguagccaac

SEQ ID NO: 37586 - RNA, 20 nt, Artificial Sequence
  HTT spacer sequence TTCN PAM
aguuggcuacaaaugcacag

SEQ ID NO: 37587 - RNA, 20 nt, Artificial Sequence
  HTT spacer sequence TTCN PAM
uggagguuauagugaugauu

SEQ ID NO: 37588 - RNA, 20 nt, Artificial Sequence
  HTT spacer sequence TTCN PAM
aagucccucgacugucuccu

SEQ ID NO: 37589 - RNA, 20 nt, Artificial Sequence
  HTT spacer sequence TTCN PAM
gauuucuaagucccucgacu

SEQ ID NO: 37590 - RNA, 20 nt, Artificial Sequence
  HTT spacer sequence TTCN PAM
uucagauuucuaagucccuc

SEQ ID NO: 37591 - RNA, 20 nt, Artificial Sequence
  HTT spacer sequence TTCN PAM
gauuucauucagauuucuaa

SEQ ID NO: 37592 - RNA, 20 nt, Artificial Sequence
  HTT spacer sequence TTCN PAM
aaucuucagacauauaccac

SEQ ID NO: 37593 - RNA, 20 nt, Artificial Sequence
  HTT spacer sequence TTCN PAM
gacauauaccacuaaccaag

SEQ ID NO: 37594 - RNA, 20 nt, Artificial Sequence
  HTT spacer sequence TTCN PAM
aaggaaucuaggcuagucug

SEQ ID NO: 37595 - RNA, 20 nt, Artificial Sequence
  HTT spacer sequence TTCN PAM
uuagaaccaauuuuagacaa

SEQ ID NO: 37596 - RNA, 20 nt, Artificial Sequence
  HTT spacer sequence TTCN PAM
acuuuugugaggcugcacaa

SEQ ID NO: 37597 - RNA, 20 nt, Artificial Sequence
  HTT spacer sequence TTCN PAM
acauuuuacauuugugcagc

SEQ ID NO: 37598 - RNA, 20 nt, Artificial Sequence
  HTT spacer sequence TTCN PAM
aucagugcuuuuuauucaac

SEQ ID NO: 37599 - RNA, 20 nt, Artificial Sequence
  HTT spacer sequence TTCN PAM
acacacuuccaucagugcuu

SEQ ID NO: 37600 - RNA, 20 nt, Artificial Sequence
  HTT spacer sequence TTCN PAM
ucucuuuguucuguuguaau

SEQ ID NO: 37601 - RNA, 20 nt, Artificial Sequence
  HTT spacer sequence TTCN PAM
cuuuguucuguuguaauuuu

SEQ ID NO: 37602 - RNA, 20 nt, Artificial Sequence
  HTT spacer sequence TTCN PAM
guuguaauuuuaguugcagu

SEQ ID NO: 37603 - RNA, 20 nt, Artificial Sequence
  HTT spacer sequence TTCN PAM
uaguccagaaagaaggacaa

SEQ ID NO: 37604 - RNA, 20 nt, Artificial Sequence
  HTT spacer sequence TTCN PAM
ggacuaagaagcugcucucc

SEQ ID NO: 37605 - RNA, 20 nt, Artificial Sequence
  HTT spacer sequence TTCN PAM
uucuggacuaagaagcugcu

SEQ ID NO: 37606 - RNA, 20 nt, Artificial Sequence
  HTT spacer sequence TTCN PAM
uccuccuccucgcugauggc

SEQ ID NO: 37607 - RNA, 20 nt, Artificial Sequence
  HTT spacer sequence TTCN PAM
uacauguuguuccuccagga

SEQ ID NO: 37608 - RNA, 20 nt, Artificial Sequence
  HTT spacer sequence TTCN PAM
uccaggacuuaaaaaucauu

SEQ ID NO: 37609 - RNA, 20 nt, Artificial Sequence
  HTT spacer sequence TTCN PAM
cagagacgugcaccgcggug

SEQ ID NO: 37610 - RNA, 20 nt, Artificial Sequence
  HTT spacer sequence TTCN PAM
aggaguccacacucaccgcg

SEQ ID NO: 37611 - RNA, 20 nt, Artificial Sequence
  HTT spacer sequence TTCN PAM
gagugaacaccuuauccgua

SEQ ID NO: 37612 - RNA, 20 nt, Artificial Sequence
  HTT spacer sequence TTCN PAM
cucggaaacaaaagagcugg

SEQ ID NO: 37613 - RNA, 20 nt, Artificial Sequence
  HTT spacer sequence TTCN PAM
ccccgcacuucccacacucu

SEQ ID NO: 37614 - RNA, 20 nt, Artificial Sequence
  HTT spacer sequence TTCN PAM
cacacucugcaguuauucug

SEQ ID NO: 37615 - RNA, 20 nt, Artificial Sequence
  HTT spacer sequence TTCN PAM
gagauccuugagggcaggga

SEQ ID NO: 37616 - RNA, 20 nt, Artificial Sequence
  HTT spacer sequence TTCN PAM
cugcccucaaggaucucaga

SEQ ID NO: 37617 - RNA, 20 nt, Artificial Sequence
  HTT spacer sequence TTCN PAM
uuguguucucagaaauuaau

SEQ ID NO: 37618 - RNA, 20 nt, Artificial Sequence
  HTT spacer sequence TTCN PAM
cagaaauuaaugcucggccu

SEQ ID NO: 37619 - RNA, 20 nt, Artificial Sequence
  HTT spacer sequence TTCN PAM
gagaacacaaagaagacaaa

SEQ ID NO: 37620 - RNA, 20 nt, Artificial Sequence
  HTT spacer sequence TTCN PAM
uuaucacucaacaaaagguu

SEQ ID NO: 37621 - RNA, 20 nt, Artificial Sequence
  HTT spacer sequence TTCN PAM
cacaugaguauucaguaacc

SEQ ID NO: 37622 - RNA, 20 nt, Artificial Sequence
  HTT spacer sequence TTCN PAM
guaaccucagugucagguuc

SEQ ID NO: 37623 - RNA, 20 nt, Artificial Sequence
  HTT spacer sequence TTCN PAM
gccaucuguuuugguggaua

SEQ ID NO: 37624 - RNA, 20 nt, Artificial Sequence
  HTT spacer sequence TTCN PAM
uuuaaauauccaccaaaaca

SEQ ID NO: 37625 - RNA, 20 nt, Artificial Sequence
  HTT spacer sequence TTCN PAM
gcuuuuccuacagaaaaaaa

SEQ ID NO: 37626 - RNA, 20 nt, Artificial Sequence
  HTT spacer sequence TTCN PAM
uacagaaaaaaaaaaaaauc

SEQ ID NO: 37627 - RNA, 20 nt, Artificial Sequence
  HTT spacer sequence TTCN PAM
guaggaaaagcggaauuuuc

SEQ ID NO: 37628 - RNA, 20 nt, Artificial Sequence
  HTT spacer sequence TTCN PAM
ugcacuuuccucccaauucu

SEQ ID NO: 37629 - RNA, 20 nt, Artificial Sequence
  HTT spacer sequence TTCN PAM
ucccaauucuagaguaggua

SEQ ID NO: 37630 - RNA, 20 nt, Artificial Sequence
  HTT spacer sequence TTCN PAM
agaguagguauuuuacuagg

SEQ ID NO: 37631 - RNA, 20 nt, Artificial Sequence
  HTT spacer sequence TTCN PAM
uaguaaaauaccuacucuag

SEQ ID NO: 37632 - RNA, 20 nt, Artificial Sequence
  HTT spacer sequence TTCN PAM
ucccaacaggcacugccacc

SEQ ID NO: 37633 - RNA, 20 nt, Artificial Sequence
  HTT spacer sequence TTCN PAM
uuggccaagugucuuuuguu

SEQ ID NO: 37634 - RNA, 20 nt, Artificial Sequence
  HTT spacer sequence TTCN PAM
ugccagggccccuaggcugc

SEQ ID NO: 37635 - RNA, 20 nt, Artificial Sequence
  HTT spacer sequence TTCN PAM
gcuucuuuagcccagugucu

SEQ ID NO: 37636 - RNA, 20 nt, Artificial Sequence
  HTT spacer sequence TTCN PAM
uuagcccagugucugguggg

SEQ ID NO: 37637 - RNA, 20 nt, Artificial Sequence
  HTT spacer sequence TTCN PAM
ccaccagacacugggcuaaa

SEQ ID NO: 37638 - RNA, 20 nt, Artificial Sequence
  HTT spacer sequence TTCN PAM
augcucuguggcucaggaaa

SEQ ID NO: 37639 - RNA, 20 nt, Artificial Sequence
  HTT spacer sequence TTCN PAM
ugagccacagagcauggaaa

SEQ ID NO: 37640 - RNA, 20 nt, Artificial Sequence
  HTT spacer sequence TTCN PAM
aucaugagugcaccagugcu

SEQ ID NO: 37641 - RNA, 20 nt, Artificial Sequence
  HTT spacer sequence TTCN PAM
ccccgcuuuugugcaauccu

SEQ ID NO: 37642 - RNA, 20 nt, Artificial Sequence
  HTT spacer sequence TTCN PAM
ugucuuuagucuucugcaua

SEQ ID NO: 37643 - RNA, 20 nt, Artificial Sequence
  HTT spacer sequence TTCN PAM
gcauaguacuuuucucuucu

SEQ ID NO: 37644 - RNA, 20 nt, Artificial Sequence
  HTT spacer sequence TTCN PAM
cuucugguucccgguucaag

SEQ ID NO: 37645 - RNA, 20 nt, Artificial Sequence
  HTT spacer sequence TTCN PAM
gguucccgguucaagguuuu

SEQ ID NO: 37646 - RNA, 20 nt, Artificial Sequence
  HTT spacer sequence TTCN PAM
cgguucaagguuuuguaauu

SEQ ID NO: 37647 - RNA, 20 nt, Artificial Sequence
  HTT spacer sequence TTCN PAM
agguuuuguaauuagagaau

SEQ ID NO: 37648 - RNA, 20 nt, Artificial Sequence
  HTT spacer sequence TTCN PAM
cuaauuacaaaaccuugaac

SEQ ID NO: 37649 - RNA, 20 nt, Artificial Sequence
  HTT spacer sequence TTCN PAM
gggucauucucuaauuacaa

SEQ ID NO: 37650 - RNA, 20 nt, Artificial Sequence
  HTT spacer sequence TTCN PAM
cugaauuuguaucucaaacc

SEQ ID NO: 37651 - RNA, 20 nt, Artificial Sequence
  HTT spacer sequence TTCN PAM
gagaaguccuuggcugugca

SEQ ID NO: 37652 - RNA, 20 nt, Artificial Sequence
  HTT spacer sequence TTCN PAM
ggcuucaguuugugauuuca

SEQ ID NO: 37653 - RNA, 20 nt, Artificial Sequence
  HTT spacer sequence TTCN PAM
guuugugauuucaugauuuc

SEQ ID NO: 37654 - RNA, 20 nt, Artificial Sequence
  HTT spacer sequence TTCN PAM
ugauuucuuguugcuaccua

SEQ ID NO: 37655 - RNA, 20 nt, Artificial Sequence
  HTT spacer sequence TTCN PAM
uguugcuaccuaaggaauau

SEQ ID NO: 37656 - RNA, 20 nt, Artificial Sequence
  HTT spacer sequence TTCN PAM
uuagguagcaacaagaaauc

SEQ ID NO: 37657 - RNA, 20 nt, Artificial Sequence
  HTT spacer sequence TTCN PAM
uauuccuuagguagcaacaa

SEQ ID NO: 37658 - RNA, 20 nt, Artificial Sequence
  HTT spacer sequence TTCN PAM
agccgaguggcaccucaggc

SEQ ID NO: 37659 - RNA, 20 nt, Artificial Sequence
  HTT spacer sequence TTCN PAM
guggugaggauaagaauagu

SEQ ID NO: 37660 - RNA, 20 nt, Artificial Sequence
  HTT spacer sequence TTCN PAM
uauccucaccacagaagcac

SEQ ID NO: 37661 - RNA, 20 nt, Artificial Sequence
  HTT spacer sequence TTCN PAM
auccacacgguuggcacuau

SEQ ID NO: 37662 - RNA, 20 nt, Artificial Sequence
  HTT spacer sequence TTCN PAM
aggugcuuuacauggaggga

SEQ ID NO: 37663 - RNA, 20 nt, Artificial Sequence
  HTT spacer sequence TTCN PAM
uaacaagacugucauccguu

SEQ ID NO: 37664 - RNA, 20 nt, Artificial Sequence
  HTT spacer sequence TTCN PAM
auugcuuuaaaacaguugag

SEQ ID NO: 37665 - RNA, 20 nt, Artificial Sequence
  HTT spacer sequence TTCN PAM
gggcccguugcucuaacuca

SEQ ID NO: 37666 - RNA, 20 nt, Artificial Sequence
  HTT spacer sequence TTCN PAM
guuugggugaagaugauuau

SEQ ID NO: 37667 - RNA, 20 nt, Artificial Sequence
  HTT spacer sequence TTCN PAM
cccaaacagaacccacuuca

SEQ ID NO: 37668 - RNA, 20 nt, Artificial Sequence
  HTT spacer sequence TTCN PAM
ccauggcccucuuuaggcaa

SEQ ID NO: 37669 - RNA, 20 nt, Artificial Sequence
  HTT spacer sequence TTCN PAM
cacucuugccuaaagagggc

SEQ ID NO: 37670 - RNA, 20 nt, Artificial Sequence
  HTT spacer sequence TTCN PAM
uuguuuuuuuaaucaccucg

SEQ ID NO: 37671 - RNA, 20 nt, Artificial Sequence
  HTT spacer sequence TTCN PAM
uaaaggucauccaauaaaua

SEQ ID NO: 37672 - RNA, 20 nt, Artificial Sequence
  HTT spacer sequence TTCN PAM
ccguuuuagcugggaugguc

SEQ ID NO: 37673 - RNA, 20 nt, Artificial Sequence
  HTT spacer sequence TTCN PAM
ccugccucagccucccaagu

SEQ ID NO: 37674 - RNA, 20 nt, Artificial Sequence
  HTT spacer sequence TTCN PAM
cgccauucuccugccucagc

SEQ ID NO: 37675 - RNA, 20 nt, Artificial Sequence
  HTT spacer sequence TTCN PAM
cauuggacuuaagcaauuaa

SEQ ID NO: 37676 - RNA, 20 nt, Artificial Sequence
  HTT spacer sequence TTCN PAM
cuauccuaggaaguugccca

SEQ ID NO: 37677 - RNA, 20 nt, Artificial Sequence
  HTT spacer sequence TTCN PAM
uaggauagagaaggacuucu

SEQ ID NO: 37678 - RNA, 20 nt, Artificial Sequence
  HTT spacer sequence TTCN PAM
acaguuugggcaacuuccua

SEQ ID NO: 37679 - RNA, 20 nt, Artificial Sequence
  HTT spacer sequence TTCN PAM
agacucaagacaccauucug

SEQ ID NO: 37680 - RNA, 20 nt, Artificial Sequence
  HTT spacer sequence TTCN PAM
guggaucuucccaagggugu

SEQ ID NO: 37681 - RNA, 20 nt, Artificial Sequence
  HTT spacer sequence TTCN PAM
caagggugugaaguguccac

SEQ ID NO: 37682 - RNA, 20 nt, Artificial Sequence
  HTT spacer sequence TTCN PAM
cacccuugggaagauccaca

SEQ ID NO: 37683 - RNA, 20 nt, Artificial Sequence
  HTT spacer sequence TTCN PAM
augcccaccagaaccaugcc

SEQ ID NO: 37684 - RNA, 20 nt, Artificial Sequence
  HTT spacer sequence TTCN PAM
ggugggcauggaaacuccca

SEQ ID NO: 37685 - RNA, 20 nt, Artificial Sequence
  HTT spacer sequence TTCN PAM
uaggucagagugcuugaggg

SEQ ID NO: 37686 - RNA, 20 nt, Artificial Sequence
  HTT spacer sequence TTCN PAM
cuggcuuuccuaggucagag

SEQ ID NO: 37687 - RNA, 20 nt, Artificial Sequence
  HTT spacer sequence TTCN PAM
cuggucucccaggaccugug

SEQ ID NO: 37688 - RNA, 20 nt, Artificial Sequence
  HTT spacer sequence TTCN PAM
uuuaggacaccuccucugcc

SEQ ID NO: 37689 - RNA, 20 nt, Artificial Sequence
  HTT spacer sequence TTCN PAM
agcugucacaggcugcugcu

SEQ ID NO: 37690 - RNA, 20 nt, Artificial Sequence
  HTT spacer sequence TTCN PAM
cagcccucuggcccacucuc

SEQ ID NO: 37691 - RNA, 20 nt, Artificial Sequence
  HTT spacer sequence TTCN PAM
ggaccauuccagcaauccca

SEQ ID NO: 37692 - RNA, 20 nt, Artificial Sequence
  HTT spacer sequence TTCN PAM
agcaaucccagcagaaaaug

SEQ ID NO: 37693 - RNA, 20 nt, Artificial Sequence
  HTT spacer sequence TTCN PAM
gcugggauugcuggaauggu

SEQ ID NO: 37694 - RNA, 20 nt, Artificial Sequence
  HTT spacer sequence TTCN PAM
ccccauuuucugcugggauu

SEQ ID NO: 37695 - RNA, 20 nt, Artificial Sequence
  HTT spacer sequence TTCN PAM
uauccgccuauaccauacaa

SEQ ID NO: 37696 - RNA, 20 nt, Artificial Sequence
  HTT spacer sequence TTCN PAM
accuucauauccgccuauac

SEQ ID NO: 37697 - RNA, 20 nt, Artificial Sequence
  HTT spacer sequence TTCN PAM
guggccaacucagagucuaa

SEQ ID NO: 37698 - RNA, 20 nt, Artificial Sequence
  HTT spacer sequence TTCN PAM
acaguuacagcuugagcagc

SEQ ID NO: 37699 - RNA, 20 nt, Artificial Sequence
  HTT spacer sequence TTCN PAM
acacugggcauauaggaugu

SEQ ID NO: 37700 - RNA, 20 nt, Artificial Sequence
  HTT spacer sequence TTCN PAM
gccaccaucucacaggcugc

SEQ ID NO: 37701 - RNA, 20 nt, Artificial Sequence
  HTT spacer sequence TTCN PAM
uuuuaugacccaaggccaac

SEQ ID NO: 37702 - RNA, 20 nt, Artificial Sequence
  HTT spacer sequence TTCN PAM
cacgccauugcuaaggaaca

SEQ ID NO: 37703 - RNA, 20 nt, Artificial Sequence
  HTT spacer sequence TTCN PAM
uuagcaauggcgugagaaac

SEQ ID NO: 37704 - RNA, 20 nt, Artificial Sequence
  HTT spacer sequence TTCN PAM
uugcagaagaccaaguacgg

SEQ ID NO: 37705 - RNA, 20 nt, Artificial Sequence
  HTT spacer sequence TTCN PAM
gcaaggaacgagcagacuca

SEQ ID NO: 37706 - RNA, 20 nt, Artificial Sequence
  HTT spacer sequence TTCN PAM
ccguacuuggucuucugcaa

SEQ ID NO: 37707 - RNA, 20 nt, Artificial Sequence
  HTT spacer sequence TTCN PAM
gucccgcccucucacgugug

SEQ ID NO: 37708 - RNA, 20 nt, Artificial Sequence
  HTT spacer sequence TTCN PAM
ggugcccacugugguucugg

SEQ ID NO: 37709 - RNA, 20 nt, Artificial Sequence
  HTT spacer sequence TTCN PAM
ggugccaggcugcuuuccuc

SEQ ID NO: 37710 - RNA, 20 nt, Artificial Sequence
  HTT spacer sequence TTCN PAM
ucaggcaccacguguggagg

SEQ ID NO: 37711 - RNA, 20 nt, Artificial Sequence
  HTT spacer sequence TTCN PAM
acuagcgaccuccacacgug

SEQ ID NO: 37712 - RNA, 20 nt, Artificial Sequence
  HTT spacer sequence TTCN PAM
aaaaugaacugaggcccuac

SEQ ID NO: 37713 - RNA, 20 nt, Artificial Sequence
  HTT spacer sequence TTCN PAM
uuuuagaaaacccaguauuu

SEQ ID NO: 37714 - RNA, 20 nt, Artificial Sequence
  HTT spacer sequence TTCN PAM
agagcaacuagaccacuuug

SEQ ID NO: 37715 - RNA, 20 nt, Artificial Sequence
  HTT spacer sequence TTCN PAM
ggucugcuauuaagcaaagu

SEQ ID NO: 37716 - RNA, 20 nt, Artificial Sequence
  HTT spacer sequence TTCN PAM
uuuggagauaauucauguuu

SEQ ID NO: 37717 - RNA, 20 nt, Artificial Sequence
  HTT spacer sequence TTCN PAM
uguuuuucuacacaguuuug

SEQ ID NO: 37718 - RNA, 20 nt, Artificial Sequence
  HTT spacer sequence TTCN PAM
acacaguuuugcaguugucu

SEQ ID NO: 37719 - RNA, 20 nt, Artificial Sequence
  HTT spacer sequence TTCN PAM
gaauugguuuaaaguaggug

SEQ ID NO: 37720 - RNA, 20 nt, Artificial Sequence
  HTT spacer sequence TTCN PAM
gaagacaacugcaaaacugu

SEQ ID NO: 37721 - RNA, 20 nt, Artificial Sequence
  HTT spacer sequence TTCN PAM
caaagugcugggauuacagg

SEQ ID NO: 37722 - RNA, 20 nt, Artificial Sequence
  HTT spacer sequence TTCN PAM
agaccagccuggccaacaug

SEQ ID NO: 37723 - RNA, 20 nt, Artificial Sequence
  HTT spacer sequence TTCN PAM
ccauguuggccaggcugguc

SEQ ID NO: 37724 - RNA, 20 nt, Artificial Sequence
  HTT spacer sequence TTCN PAM
ccugucucagucuccugagu

SEQ ID NO: 37725 - RNA, 20 nt, Artificial Sequence
  HTT spacer sequence TTCN PAM
agcgauucuccugucucagu

SEQ ID NO: 37726 - RNA, 20 nt, Artificial Sequence
  HTT spacer sequence TTCN PAM
ccuccuggguucaagcgauu

SEQ ID NO: 37727 - RNA, 20 nt, Artificial Sequence
  HTT spacer sequence TTCN PAM
gaucaauaacaccuaccuuu

SEQ ID NO: 37728 - RNA, 20 nt, Artificial Sequence
  HTT spacer sequence TTCN PAM
gauaacaugaggagcuuagc

SEQ ID NO: 37729 - RNA, 20 nt, Artificial Sequence
  HTT spacer sequence TTCN PAM
gcccagugaaauggcaucau

SEQ ID NO: 37730 - RNA, 20 nt, Artificial Sequence
  HTT spacer sequence TTCN PAM
cugggcagaagucagucccc

SEQ ID NO: 37731 - RNA, 20 nt, Artificial Sequence
  HTT spacer sequence TTCN PAM
gcgggcuggugggagaugau

SEQ ID NO: 37732 - RNA, 20 nt, Artificial Sequence
  HTT spacer sequence TTCN PAM
uuagggccugcagcauccuc

SEQ ID NO: 37733 - RNA, 20 nt, Artificial Sequence
  HTT spacer sequence TTCN PAM
ugccugaggaugcugcaggc

SEQ ID NO: 37734 - RNA, 20 nt, Artificial Sequence
  HTT spacer sequence TTCN PAM
uuccugccugaggaugcugc

SEQ ID NO: 37735 - RNA, 20 nt, Artificial Sequence
  HTT spacer sequence TTCN PAM
cccugaccuacaccugcugg

SEQ ID NO: 37736 - RNA, 20 nt, Artificial Sequence
  HTT spacer sequence TTCN PAM
cugggaccuggcuccauucu

SEQ ID NO: 37737 - RNA, 20 nt, Artificial Sequence
  HTT spacer sequence TTCN PAM
caggcagccacaagccucuu

SEQ ID NO: 37738 - RNA, 20 nt, Artificial Sequence
  HTT spacer sequence TTCN PAM
gccgcagggaaugaagguau

SEQ ID NO: 37739 - RNA, 20 nt, Artificial Sequence
  HTT spacer sequence TTCN PAM
cugcggcagaauccuuaucu

SEQ ID NO: 37740 - RNA, 20 nt, Artificial Sequence
  HTT spacer sequence TTCN PAM
uucccugcggcagaauccuu

SEQ ID NO: 37741 - RNA, 20 nt, Artificial Sequence
  HTT spacer sequence TTCN PAM
agauggcgggcuuauuccga

SEQ ID NO: 37742 - RNA, 20 nt, Artificial Sequence
  HTT spacer sequence TTCN PAM
gaagaagaggccagugccug

SEQ ID NO: 37743 - RNA, 20 nt, Artificial Sequence
  HTT spacer sequence TTCN PAM
gaauaagcccgccaucugga

SEQ ID NO: 37744 - RNA, 20 nt, Artificial Sequence
  HTT spacer sequence TTCN PAM
ucggaauaagcccgccaucu

SEQ ID NO: 37745 - RNA, 20 nt, Artificial Sequence
  HTT spacer sequence TTCN PAM
agcaccgccaggcacuggcc

SEQ ID NO: 37746 - RNA, 20 nt, Artificial Sequence
  HTT spacer sequence TTCN PAM
gcaacugcuuccagcaccgc

SEQ ID NO: 37747 - RNA, 20 nt, Artificial Sequence
  HTT spacer sequence TTCN PAM
ugggaagagagcagcagggg

SEQ ID NO: 37748 - RNA, 20 nt, Artificial Sequence
  HTT spacer sequence TTCN PAM
caggaaagccuacaacuccc

SEQ ID NO: 37749 - RNA, 20 nt, Artificial Sequence
  HTT spacer sequence TTCN PAM
ccagcaccccugcugcucuc

SEQ ID NO: 37750 - RNA, 20 nt, Artificial Sequence
  HTT spacer sequence TTCN PAM
uuagcaucugguuaugagac

SEQ ID NO: 37751 - RNA, 20 nt, Artificial Sequence
  HTT spacer sequence TTCN PAM
uccagcaagcucuucacugg

SEQ ID NO: 37752 - RNA, 20 nt, Artificial Sequence
  HTT spacer sequence TTCN PAM
cuggcauugaggaguucccu

SEQ ID NO: 37753 - RNA, 20 nt, Artificial Sequence
  HTT spacer sequence TTCN PAM
cugagugcggucaucuggaa

SEQ ID NO: 37754 - RNA, 20 nt, Artificial Sequence
  HTT spacer sequence TTCN PAM
agaugaccgcacucagggaa

SEQ ID NO: 37755 - RNA, 20 nt, Artificial Sequence
  HTT spacer sequence TTCN PAM
uguggugagguaagagauua

SEQ ID NO: 37756 - RNA, 20 nt, Artificial Sequence
  HTT spacer sequence TTCN PAM
cacagcccaucugcacaaag

SEQ ID NO: 37757 - RNA, 20 nt, Artificial Sequence
  HTT spacer sequence TTCN PAM
guuggguccuuugucaccuc

SEQ ID NO: 37758 - RNA, 20 nt, Artificial Sequence
  HTT spacer sequence TTCN PAM
gugaggugacaaaggaccca

SEQ ID NO: 37759 - RNA, 20 nt, Artificial Sequence
  HTT spacer sequence TTCN PAM
aguggcaggaucagcucacg

SEQ ID NO: 37760 - RNA, 20 nt, Artificial Sequence
  HTT spacer sequence TTCN PAM
ucugugcauggcacuugucu

SEQ ID NO: 37761 - RNA, 20 nt, Artificial Sequence
  HTT spacer sequence TTCN PAM
gugcauggcacuugucugag

SEQ ID NO: 37762 - RNA, 20 nt, Artificial Sequence
  HTT spacer sequence TTCN PAM
cugugcgugaggugcucaga

SEQ ID NO: 37763 - RNA, 20 nt, Artificial Sequence
  HTT spacer sequence TTCN PAM
gaguuuacagaaauaagcug

SEQ ID NO: 37764 - RNA, 20 nt, Artificial Sequence
  HTT spacer sequence TTCN PAM
guaaacucugaaguccaguu

SEQ ID NO: 37765 - RNA, 20 nt, Artificial Sequence
  HTT spacer sequence TTCN PAM
uuuucaugccugcuugccaa

SEQ ID NO: 37766 - RNA, 20 nt, Artificial Sequence
  HTT spacer sequence TTCN PAM
ugccugcuugccaauaaaca

SEQ ID NO: 37767 - RNA, 20 nt, Artificial Sequence
  HTT spacer sequence TTCN PAM
gcucagauauguuuauuggc

SEQ ID NO: 37768 - RNA, 20 nt, Artificial Sequence
  HTT spacer sequence TTCN PAM
augagguucagcucagauau

SEQ ID NO: 37769 - RNA, 20 nt, Artificial Sequence
  HTT spacer sequence TTCN PAM
agcacagcaccugcuguuug

SEQ ID NO: 37770 - RNA, 20 nt, Artificial Sequence
  HTT spacer sequence TTCN PAM
cccagcacucccugaguggg

SEQ ID NO: 37771 - RNA, 20 nt, Artificial Sequence
  HTT spacer sequence TTCN PAM
uguccucauccugaggcugc

SEQ ID NO: 37772 - RNA, 20 nt, Artificial Sequence
  HTT spacer sequence TTCN PAM
ccaucaaguggcccucccaa

SEQ ID NO: 37773 - RNA, 20 nt, Artificial Sequence
  HTT spacer sequence TTCN PAM
uuccccaucaaguggcccuc

SEQ ID NO: 37774 - RNA, 20 nt, Artificial Sequence
  HTT spacer sequence TTCN PAM
ugggacuuccuuccccauca

SEQ ID NO: 37775 - RNA, 20 nt, Artificial Sequence
  HTT spacer sequence TTCN PAM
gggggagaaggugccagcuc

SEQ ID NO: 37776 - RNA, 20 nt, Artificial Sequence
  HTT spacer sequence TTCN PAM
cccccagaaaacagcuccaa

SEQ ID NO: 37777 - RNA, 20 nt, Artificial Sequence
  HTT spacer sequence TTCN PAM
cuccacugggcucccuccuc

SEQ ID NO: 37778 - RNA, 20 nt, Artificial Sequence
  HTT spacer sequence TTCN PAM
ugcuuccucacaguaugucu

SEQ ID NO: 37779 - RNA, 20 nt, Artificial Sequence
  HTT spacer sequence TTCN PAM
ucacaguaugucuguccuga

SEQ ID NO: 37780 - RNA, 20 nt, Artificial Sequence
  HTT spacer sequence TTCN PAM
uuuucaucuucucaggugug

SEQ ID NO: 37781 - RNA, 20 nt, Artificial Sequence
  HTT spacer sequence TTCN PAM
ucuucucagguguggaagcu

SEQ ID NO: 37782 - RNA, 20 nt, Artificial Sequence
  HTT spacer sequence TTCN PAM
cagguguggaagcuuggaug

SEQ ID NO: 37783 - RNA, 20 nt, Artificial Sequence
  HTT spacer sequence TTCN PAM
acaccugagaagaugaaaag

SEQ ID NO: 37784 - RNA, 20 nt, Artificial Sequence
  HTT spacer sequence TTCN PAM
cugagauccccguggaguuc

SEQ ID NO: 37785 - RNA, 20 nt, Artificial Sequence
  HTT spacer sequence TTCN PAM
uccaggaaaaggaagucuuu

SEQ ID NO: 37786 - RNA, 20 nt, Artificial Sequence
  HTT spacer sequence TTCN PAM
uggaggaacuccacggggau

SEQ ID NO: 37787 - RNA, 20 nt, Artificial Sequence
  HTT spacer sequence TTCN PAM
uuuuccuggaggaacuccac

SEQ ID NO: 37788 - RNA, 20 nt, Artificial Sequence
  HTT spacer sequence TTCN PAM
ucuaccgcaucaacacacua

SEQ ID NO: 37789 - RNA, 20 nt, Artificial Sequence
  HTT spacer sequence TTCN PAM
ggucaccauugucggacauc

SEQ ID NO: 37790 - RNA, 20 nt, Artificial Sequence
  HTT spacer sequence TTCN PAM
ucccgguagauguccgacaa

SEQ ID NO: 37791 - RNA, 20 nt, Artificial Sequence
  HTT spacer sequence TTCN PAM
cauuugacuccagaaaagau

SEQ ID NO: 37792 - RNA, 20 nt, Artificial Sequence
  HTT spacer sequence TTCN PAM
ggagucaaaugagaagaucc

SEQ ID NO: 37793 - RNA, 20 nt, Artificial Sequence
  HTT spacer sequence TTCN PAM
cauagguuuguauuauuauc

SEQ ID NO: 37794 - RNA, 20 nt, Artificial Sequence
  HTT spacer sequence TTCN PAM
caguauaaaaggaguuuugc

SEQ ID NO: 37795 - RNA, 20 nt, Artificial Sequence
  HTT spacer sequence TTCN PAM
uguguuuuguggcuugaauc

SEQ ID NO: 37796 - RNA, 20 nt, Artificial Sequence
  HTT spacer sequence TTCN PAM
agccacaaaacacaggaacu

SEQ ID NO: 37797 - RNA, 20 nt, Artificial Sequence
  HTT spacer sequence TTCN PAM
gggcuuguuugaagucagga

SEQ ID NO: 37798 - RNA, 20 nt, Artificial Sequence
  HTT spacer sequence TTCN PAM
aacaagcccggaauacacaa

SEQ ID NO: 37799 - RNA, 20 nt, Artificial Sequence
  HTT spacer sequence TTCN PAM
ugacuucaaacaagcccgga

SEQ ID NO: 37800 - RNA, 20 nt, Artificial Sequence
  HTT spacer sequence TTCN PAM
uguguaguggacaacgugag

SEQ ID NO: 37801 - RNA, 20 nt, Artificial Sequence
  HTT spacer sequence TTCN PAM
gccuuagauuuugcauuuag

SEQ ID NO: 37802 - RNA, 20 nt, Artificial Sequence
  HTT spacer sequence TTCN PAM
gagacaagugcugccacugu

SEQ ID NO: 37803 - RNA, 20 nt, Artificial Sequence
  HTT spacer sequence TTCN PAM
uguguucaccagucugaucc

SEQ ID NO: 37804 - RNA, 20 nt, Artificial Sequence
  HTT spacer sequence TTCN PAM
ccagucugauccuguugugu

SEQ ID NO: 37805 - RNA, 20 nt, Artificial Sequence
  HTT spacer sequence TTCN PAM
cauaugggaacaagcagacg

SEQ ID NO: 37806 - RNA, 20 nt, Artificial Sequence
  HTT spacer sequence TTCN PAM
cauaugagaaaauggaccac

SEQ ID NO: 37807 - RNA, 20 nt, Artificial Sequence
  HTT spacer sequence TTCN PAM
uggcacucgccuuccccaga

SEQ ID NO: 37808 - RNA, 20 nt, Artificial Sequence
  HTT spacer sequence TTCN PAM
ccagagccuagaggcagcau

SEQ ID NO: 37809 - RNA, 20 nt, Artificial Sequence
  HTT spacer sequence TTCN PAM
ccccaugcugccucuaggcu

SEQ ID NO: 37810 - RNA, 20 nt, Artificial Sequence
  HTT spacer sequence TTCN PAM
agcccuccuaccugagcagc

SEQ ID NO: 37811 - RNA, 20 nt, Artificial Sequence
  HTT spacer sequence TTCN PAM
uagaauuguugcagauuuag

SEQ ID NO: 37812 - RNA, 20 nt, Artificial Sequence
  HTT spacer sequence TTCN PAM
augaaauagacacgaccccc

SEQ ID NO: 37813 - RNA, 20 nt, Artificial Sequence
  HTT spacer sequence TTCN PAM
aaaucugcaacaauucuaug

SEQ ID NO: 37814 - RNA, 20 nt, Artificial Sequence
  HTT spacer sequence TTCN PAM
aaacaaauguuaccccuuau

SEQ ID NO: 37815 - RNA, 20 nt, Artificial Sequence
  HTT spacer sequence TTCN PAM
aaauaagugucuaaaugaau

SEQ ID NO: 37816 - RNA, 20 nt, Artificial Sequence
  HTT spacer sequence TTCN PAM
uuuagacacuuauuuagaaa

SEQ ID NO: 37817 - RNA, 20 nt, Artificial Sequence
  HTT spacer sequence TTCN PAM
cagugacugugcccugcugu

SEQ ID NO: 37818 - RNA, 20 nt, Artificial Sequence
  HTT spacer sequence TTCN PAM
uggaauguuccugucuuguc

SEQ ID NO: 37819 - RNA, 20 nt, Artificial Sequence
  HTT spacer sequence TTCN PAM
aggaaacaccacagcagggc

SEQ ID NO: 37820 - RNA, 20 nt, Artificial Sequence
  HTT spacer sequence TTCN PAM
ugucuuguccuagaaagucu

SEQ ID NO: 37821 - RNA, 20 nt, Artificial Sequence
  HTT spacer sequence TTCN PAM
aggacaagacaggaacauuc

SEQ ID NO: 37822 - RNA, 20 nt, Artificial Sequence
  HTT spacer sequence TTCN PAM
gcagauuugaggcuuguuug

SEQ ID NO: 37823 - RNA, 20 nt, Artificial Sequence
  HTT spacer sequence TTCN PAM
gggauccaaacaagccucaa

SEQ ID NO: 37824 - RNA, 20 nt, Artificial Sequence
  HTT spacer sequence TTCN PAM
ccuuuauaauucaaugucca

SEQ ID NO: 37825 - RNA, 20 nt, Artificial Sequence
  HTT spacer sequence TTCN PAM
auguccaaagagagcccuga

SEQ ID NO: 37826 - RNA, 20 nt, Artificial Sequence
  HTT spacer sequence TTCN PAM
uggcugugaggaucgguauc

SEQ ID NO: 37827 - RNA, 20 nt, Artificial Sequence
  HTT spacer sequence TTCN PAM
agagcaagggcacccaagua

SEQ ID NO: 37828 - RNA, 20 nt, Artificial Sequence
  HTT spacer sequence TTCN PAM
uuguucauuuuuuucccugu

SEQ ID NO: 37829 - RNA, 20 nt, Artificial Sequence
  HTT spacer sequence TTCN PAM
uuuuuuucccuguaacguaa

SEQ ID NO: 37830 - RNA, 20 nt, Artificial Sequence
  HTT spacer sequence TTCN PAM
cuguaacguaaauuguuaua

SEQ ID NO: 37831 - RNA, 20 nt, Artificial Sequence
  HTT spacer sequence TTCN PAM
gacacagauacagacaaaua

SEQ ID NO: 37832 - RNA, 20 nt, Artificial Sequence
  HTT spacer sequence TTCN PAM
cucugucucuuguucuuucu

SEQ ID NO: 37833 - RNA, 20 nt, Artificial Sequence
  HTT spacer sequence TTCN PAM
uucuuuaccccguuuaucac

SEQ ID NO: 37834 - RNA, 20 nt, Artificial Sequence
  HTT spacer sequence TTCN PAM
uuaccccguuuaucacgggg

SEQ ID NO: 37835 - RNA, 20 nt, Artificial Sequence
  HTT spacer sequence TTCN PAM
ccuguccuaagcaccccauc

SEQ ID NO: 37836 - RNA, 20 nt, Artificial Sequence
  HTT spacer sequence TTCN PAM
uguccccaucaugaugucug

SEQ ID NO: 37837 - RNA, 20 nt, Artificial Sequence
  HTT spacer sequence TTCN PAM
gacagcugugcuucaugucc

SEQ ID NO: 37838 - RNA, 20 nt, Artificial Sequence
  HTT spacer sequence TTCN PAM
uuagauacacucgaaugcag

SEQ ID NO: 37839 - RNA, 20 nt, Artificial Sequence
  HTT spacer sequence TTCN PAM
aguguaucuaacgaacaguu

SEQ ID NO: 37840 - RNA, 20 nt, Artificial Sequence
  HTT spacer sequence TTCN PAM
cugaauccccguuccuaccu

SEQ ID NO: 37841 - RNA, 20 nt, Artificial Sequence
  HTT spacer sequence TTCN PAM
gugaaaauacauccgacaga

SEQ ID NO: 37842 - RNA, 20 nt, Artificial Sequence
  HTT spacer sequence TTCN PAM
uaccuugauacacucuuuuu

SEQ ID NO: 37843 - RNA, 20 nt, Artificial Sequence
  HTT spacer sequence TTCN PAM
ucuagacaggucagaggaac

SEQ ID NO: 37844 - RNA, 20 nt, Artificial Sequence
  HTT spacer sequence TTCN PAM
agacaggucagaggaaccau

SEQ ID NO: 37845 - RNA, 20 nt, Artificial Sequence
  HTT spacer sequence TTCN PAM
ucugaccugucuagaagaau

SEQ ID NO: 37846 - RNA, 20 nt, Artificial Sequence
  HTT spacer sequence TTCN PAM
accucaauaaagcugcuaaa

SEQ ID NO: 37847 - RNA, 20 nt, Artificial Sequence
  HTT spacer sequence TTCN PAM
cauacuacagauuucaccca

SEQ ID NO: 37848 - RNA, 20 nt, Artificial Sequence
  HTT spacer sequence TTCN PAM
cccacucuaagcggacagcu

SEQ ID NO: 37849 - RNA, 20 nt, Artificial Sequence
  HTT spacer sequence TTCN PAM
cuggaguccagcccugagac

SEQ ID NO: 37850 - RNA, 20 nt, Artificial Sequence
  HTT spacer sequence TTCN PAM
gccccacucacuaaaugggc

SEQ ID NO: 37851 - RNA, 20 nt, Artificial Sequence
  HTT spacer sequence TTCN PAM
guuuccucaaugaugaaaug

SEQ ID NO: 37852 - RNA, 20 nt, Artificial Sequence
  HTT spacer sequence TTCN PAM
ucaaugaugaaauggagggg

SEQ ID NO: 37853 - RNA, 20 nt, Artificial Sequence
  HTT spacer sequence TTCN PAM
ucauugaggaaaccgaagua

SEQ ID NO: 37854 - RNA, 20 nt, Artificial Sequence
  HTT spacer sequence TTCN PAM
ccgcaucauagaacugugug

SEQ ID NO: 37855 - RNA, 20 nt, Artificial Sequence
  HTT spacer sequence TTCN PAM
augaugcggggaacacuauc

SEQ ID NO: 37856 - RNA, 20 nt, Artificial Sequence
  HTT spacer sequence TTCN PAM
ccaggggccgugcugugucg

SEQ ID NO: 37857 - RNA, 20 nt, Artificial Sequence
  HTT spacer sequence TTCN PAM
caagccuguaacggagagcu

SEQ ID NO: 37858 - RNA, 20 nt, Artificial Sequence
  HTT spacer sequence TTCN PAM
aggcuggaccagucguacuc

SEQ ID NO: 37859 - RNA, 20 nt, Artificial Sequence
  HTT spacer sequence TTCN PAM
aacugaguacgacuggucca

SEQ ID NO: 37860 - RNA, 20 nt, Artificial Sequence
  HTT spacer sequence TTCN PAM
ucaaacugaguacgacuggu

SEQ ID NO: 37861 - RNA, 20 nt, Artificial Sequence
  HTT spacer sequence TTCN PAM
ggugggcucuccuccugcuc

SEQ ID NO: 37862 - RNA, 20 nt, Artificial Sequence
  HTT spacer sequence TTCN PAM
ccaccaaaggccugcaagcg

SEQ ID NO: 37863 - RNA, 20 nt, Artificial Sequence
  HTT spacer sequence TTCN PAM
uuuuuucucuuaccuuauuu

SEQ ID NO: 37864 - RNA, 20 nt, Artificial Sequence
  HTT spacer sequence TTCN PAM
cuuaccuuauuuuugaaaga

SEQ ID NO: 37865 - RNA, 20 nt, Artificial Sequence
  HTT spacer sequence TTCN PAM
aaaauaagguaagagaaaaa

SEQ ID NO: 37866 - RNA, 20 nt, Artificial Sequence
  HTT spacer sequence TTCN PAM
gcuacucuuucaaaaauaag

SEQ ID NO: 37867 - RNA, 20 nt, Artificial Sequence
  HTT spacer sequence TTCN PAM
agagcagggacaaagccugc

SEQ ID NO: 37868 - RNA, 20 nt, Artificial Sequence
  HTT spacer sequence TTCN PAM
agccauugguaaucgcagcc

SEQ ID NO: 37869 - RNA, 20 nt, Artificial Sequence
  HTT spacer sequence TTCN PAM
auguuaaggaucaauacgau

SEQ ID NO: 37870 - RNA, 20 nt, Artificial Sequence
  HTT spacer sequence TTCN PAM
ggaaaauaucuuuuaguuua

SEQ ID NO: 37871 - RNA, 20 nt, Artificial Sequence
  HTT spacer sequence TTCN PAM
agaaagggcacaaucguauu

SEQ ID NO: 37872 - RNA, 20 nt, Artificial Sequence
  HTT spacer sequence TTCN PAM
gaggaguguagguugaauua

SEQ ID NO: 37873 - RNA, 20 nt, Artificial Sequence
  HTT spacer sequence TTCN PAM
accuacacuccucugaauau

SEQ ID NO: 37874 - RNA, 20 nt, Artificial Sequence
  HTT spacer sequence TTCN PAM
uuuuaauucaaccuacacuc

SEQ ID NO: 37875 - RNA, 20 nt, Artificial Sequence
  HTT spacer sequence TTCN PAM
uuuuucuaaugucuugcaga

SEQ ID NO: 37876 - RNA, 20 nt, Artificial Sequence
  HTT spacer sequence TTCN PAM
aaugucuugcagagauuuua

SEQ ID NO: 37877 - RNA, 20 nt, Artificial Sequence
  HTT spacer sequence TTCN PAM
ugaaguguucacguacauua

SEQ ID NO: 37878 - RNA, 20 nt, Artificial Sequence
  HTT spacer sequence TTCN PAM
agaagccugauaaaaucucu

SEQ ID NO: 37879 - RNA, 20 nt, Artificial Sequence
  HTT spacer sequence TTCN PAM
cguacauuacgcuaacacga

SEQ ID NO: 37880 - RNA, 20 nt, Artificial Sequence
  HTT spacer sequence TTCN PAM
gcuggcuccgcuguaccaga

SEQ ID NO: 37881 - RNA, 20 nt, Artificial Sequence
  HTT spacer sequence TTCN PAM
cauucugcuggcuccgcugu

SEQ ID NO: 37882 - RNA, 20 nt, Artificial Sequence
  HTT spacer sequence TTCN PAM
acaacuucccauucugcugg

SEQ ID NO: 37883 - RNA, 20 nt, Artificial Sequence
  HTT spacer sequence TTCN PAM
gauagaaggugugguuugaa

SEQ ID NO: 37884 - RNA, 20 nt, Artificial Sequence
  HTT spacer sequence TTCN PAM
aucagaaucaagggccugca

SEQ ID NO: 37885 - RNA, 20 nt, Artificial Sequence
  HTT spacer sequence TTCN PAM
aaccacaccuucuaucagaa

SEQ ID NO: 37886 - RNA, 20 nt, Artificial Sequence
  HTT spacer sequence TTCN PAM
gugaguucaaaccacaccuu

SEQ ID NO: 37887 - RNA, 20 nt, Artificial Sequence
  HTT spacer sequence TTCN PAM
ugcauagaagcuaacagggu

SEQ ID NO: 37888 - RNA, 20 nt, Artificial Sequence
  HTT spacer sequence TTCN PAM
augcaugaauuuaaagacaa

SEQ ID NO: 37889 - RNA, 20 nt, Artificial Sequence
  HTT spacer sequence TTCN PAM
cucauacauuuuacaggccu

SEQ ID NO: 37890 - RNA, 20 nt, Artificial Sequence
  HTT spacer sequence TTCN PAM
aagauaauuuauuaaaaagu

SEQ ID NO: 37891 - RNA, 20 nt, Artificial Sequence
  HTT spacer sequence TTCN PAM
uguuuggaguuuugugccca

SEQ ID NO: 37892 - RNA, 20 nt, Artificial Sequence
  HTT spacer sequence TTCN PAM
aaucaaggacuccuuugggc

SEQ ID NO: 37893 - RNA, 20 nt, Artificial Sequence
  HTT spacer sequence TTCN PAM
gggcccgugugugcggaggc

SEQ ID NO: 37894 - RNA, 20 nt, Artificial Sequence
  HTT spacer sequence TTCN PAM
gucaggcugagcucacgggg

SEQ ID NO: 37895 - RNA, 20 nt, Artificial Sequence
  HTT spacer sequence TTCN PAM
ucccauugaggcagggaaga

SEQ ID NO: 37896 - RNA, 20 nt, Artificial Sequence
  HTT spacer sequence TTCN PAM
cugccucaaugggaggaaga

SEQ ID NO: 37897 - RNA, 20 nt, Artificial Sequence
  HTT spacer sequence TTCN PAM
gcaggcagaggugguugugg

SEQ ID NO: 37898 - RNA, 20 nt, Artificial Sequence
  HTT spacer sequence TTCN PAM
aggaagacacagagaggacc

SEQ ID NO: 37899 - RNA, 20 nt, Artificial Sequence
  HTT spacer sequence TTCN PAM
uggaaggagagcccacaugu

SEQ ID NO: 37900 - RNA, 20 nt, Artificial Sequence
  HTT spacer sequence TTCN PAM
ggggcugcugcuccaagcag

SEQ ID NO: 37901 - RNA, 20 nt, Artificial Sequence
  HTT spacer sequence TTCN PAM
gaggcuuguuccggggcugc

SEQ ID NO: 37902 - RNA, 20 nt, Artificial Sequence
  HTT spacer sequence TTCN PAM
cacgugucucugggacauag

SEQ ID NO: 37903 - RNA, 20 nt, Artificial Sequence
  HTT spacer sequence TTCN PAM
ccgcugaagcguccagcagc

SEQ ID NO: 37904 - RNA, 20 nt, Artificial Sequence
  HTT spacer sequence TTCN PAM
gcggggaacccacugucccc

SEQ ID NO: 37905 - RNA, 20 nt, Artificial Sequence
  HTT spacer sequence TTCN PAM
accaggccguuuuccuucau

SEQ ID NO: 37906 - RNA, 20 nt, Artificial Sequence
  HTT spacer sequence TTCN PAM
uucauugcuagaauugaaaa

SEQ ID NO: 37907 - RNA, 20 nt, Artificial Sequence
  HTT spacer sequence TTCN PAM
uugcuagaauugaaaacacc

SEQ ID NO: 37908 - RNA, 20 nt, Artificial Sequence
  HTT spacer sequence TTCN PAM
agcaaugaaggaaaacggcc

SEQ ID NO: 37909 - RNA, 20 nt, Artificial Sequence
  HTT spacer sequence TTCN PAM
auucuagcaaugaaggaaaa

SEQ ID NO: 37910 - RNA, 20 nt, Artificial Sequence
  HTT spacer sequence TTCN PAM
cacugaccaggaggccaccu

SEQ ID NO: 37911 - RNA, 20 nt, Artificial Sequence
  HTT spacer sequence TTCN PAM
agcuucucacugaccaggag

SEQ ID NO: 37912 - RNA, 20 nt, Artificial Sequence
  HTT spacer sequence TTCN PAM
ugucacguuuccagcuucuc

SEQ ID NO: 37913 - RNA, 20 nt, Artificial Sequence
  HTT spacer sequence TTCN PAM
ccuaaaugcucaauaacccc

SEQ ID NO: 37914 - RNA, 20 nt, Artificial Sequence
  HTT spacer sequence TTCN PAM
ugcucugcuaacgucuuccc

SEQ ID NO: 37915 - RNA, 20 nt, Artificial Sequence
  HTT spacer sequence TTCN PAM
acuaguugccugcucauucc

SEQ ID NO: 37916 - RNA, 20 nt, Artificial Sequence
  HTT spacer sequence TTCN PAM
uaagugagcaccuguccgug

SEQ ID NO: 37917 - RNA, 20 nt, Artificial Sequence
  HTT spacer sequence TTCN PAM
uuugguauuacaccagguuc

SEQ ID NO: 37918 - RNA, 20 nt, Artificial Sequence
  HTT spacer sequence TTCN PAM
uuuaggcaaagcggagggaa

SEQ ID NO: 37919 - RNA, 20 nt, Artificial Sequence
  HTT spacer sequence TTCN PAM
cuccgcuuugccuaaaggaa

SEQ ID NO: 37920 - RNA, 20 nt, Artificial Sequence
  HTT spacer sequence TTCN PAM
gguguuuuucacuuguaaga

SEQ ID NO: 37921 - RNA, 20 nt, Artificial Sequence
  HTT spacer sequence TTCN PAM
cuuguaagauuuugaaggaa

SEQ ID NO: 37922 - RNA, 20 nt, Artificial Sequence
  HTT spacer sequence TTCN PAM
aaaucuuacaagugaaaaac

SEQ ID NO: 37923 - RNA, 20 nt, Artificial Sequence
  HTT spacer sequence TTCN PAM
uucaaaaucuuacaagugaa

SEQ ID NO: 37924 - RNA, 20 nt, Artificial Sequence
  HTT spacer sequence TTCN PAM
aaaauguagguuugggagga

SEQ ID NO: 37925 - RNA, 20 nt, Artificial Sequence
  HTT spacer sequence TTCN PAM
ucccaaaccuacauuuuaga

SEQ ID NO: 37926 - RNA, 20 nt, Artificial Sequence
  HTT spacer sequence TTCN PAM
agcaaugguuucaaagagag

SEQ ID NO: 37927 - RNA, 20 nt, Artificial Sequence
  HTT spacer sequence TTCN PAM
aagagagagaauauugccac

SEQ ID NO: 37928 - RNA, 20 nt, Artificial Sequence
  HTT spacer sequence TTCN PAM
cucucuuugaaaccauugcu

SEQ ID NO: 37929 - RNA, 20 nt, Artificial Sequence
  HTT spacer sequence TTCN PAM
cugucuccggcuacuacagg

SEQ ID NO: 37930 - RNA, 20 nt, Artificial Sequence
  HTT spacer sequence TTCN PAM
cucagguaccuguaguagcc

SEQ ID NO: 37931 - RNA, 20 nt, Artificial Sequence
  HTT spacer sequence TTCN PAM
agcccaaguacaaccgcucc

SEQ ID NO: 37932 - RNA, 20 nt, Artificial Sequence
  HTT spacer sequence TTCN PAM
cucauucuagcccaaguaca

SEQ ID NO: 37933 - RNA, 20 nt, Artificial Sequence
  HTT spacer sequence TTCN PAM
cgcaucacugguguggugag

SEQ ID NO: 37934 - RNA, 20 nt, Artificial Sequence
  HTT spacer sequence TTCN PAM
uaagcaggagucuuagucag

SEQ ID NO: 37935 - RNA, 20 nt, Artificial Sequence
  HTT spacer sequence TTCN PAM
ucccugggccugacuaagac

SEQ ID NO: 37936 - RNA, 20 nt, Artificial Sequence
  HTT spacer sequence TTCN PAM
agauuuuacuuccucccugg

SEQ ID NO: 37937 - RNA, 20 nt, Artificial Sequence
  HTT spacer sequence TTCN PAM
uuuccagauuuuacuuccuc

SEQ ID NO: 37938 - RNA, 20 nt, Artificial Sequence
  HTT spacer sequence TTCN PAM
cauucauuuccagauuuuac

SEQ ID NO: 37939 - RNA, 20 nt, Artificial Sequence
  HTT spacer sequence TTCN PAM
cuccugccagucaagaaaug

SEQ ID NO: 37940 - RNA, 20 nt, Artificial Sequence
  HTT spacer sequence TTCN PAM
ugacuggcaggagagaaugc

SEQ ID NO: 37941 - RNA, 20 nt, Artificial Sequence
  HTT spacer sequence TTCN PAM
cauuucuugacuggcaggag

SEQ ID NO: 37942 - RNA, 20 nt, Artificial Sequence
  HTT spacer sequence TTCN PAM
cuucucauuucuugacuggc

SEQ ID NO: 37943 - RNA, 20 nt, Artificial Sequence
  HTT spacer sequence TTCN PAM
uucgcuucucauuucuugac

SEQ ID NO: 37944 - RNA, 20 nt, Artificial Sequence
  HTT spacer sequence TTCN PAM
cacgggcuguaagaccagca

SEQ ID NO: 37945 - RNA, 20 nt, Artificial Sequence
  HTT spacer sequence TTCN PAM
acuuuuaaauccugcugguc

SEQ ID NO: 37946 - RNA, 20 nt, Artificial Sequence
  HTT spacer sequence TTCN PAM
uaacauaagcaacuaauuca

SEQ ID NO: 37947 - RNA, 20 nt, Artificial Sequence
  HTT spacer sequence TTCN PAM
ucuacacaagcugaaucucc

SEQ ID NO: 37948 - RNA, 20 nt, Artificial Sequence
  HTT spacer sequence TTCN PAM
gcuuguguagaugaacuugg

SEQ ID NO: 37949 - RNA, 20 nt, Artificial Sequence
  HTT spacer sequence TTCN PAM
uaagaaaccauguguggcag

SEQ ID NO: 37950 - RNA, 20 nt, Artificial Sequence
  HTT spacer sequence TTCN PAM
uaggaaaagcuggagauuca

SEQ ID NO: 37951 - RNA, 20 nt, Artificial Sequence
  HTT spacer sequence TTCN PAM
gguugugugccugcccuauc

SEQ ID NO: 37952 - RNA, 20 nt, Artificial Sequence
  HTT spacer sequence TTCN PAM
uuuaaaccaggugacaagcu

SEQ ID NO: 37953 - RNA, 20 nt, Artificial Sequence
  HTT spacer sequence TTCN PAM
cucaaaaguauuuuagcgua

SEQ ID NO: 37954 - RNA, 20 nt, Artificial Sequence
  HTT spacer sequence TTCN PAM
guagcuauuuaggaguuuaa

SEQ ID NO: 37955 - RNA, 20 nt, Artificial Sequence
  HTT spacer sequence TTCN PAM
aggugcuuaaacuccuaaau

SEQ ID NO: 37956 - RNA, 20 nt, Artificial Sequence
  HTT spacer sequence TTCN PAM
gcaauuaaagccuucaaggu

SEQ ID NO: 37957 - RNA, 20 nt, Artificial Sequence
  HTT spacer sequence TTCN PAM
auguggacgugcaauguguu

SEQ ID NO: 37958 - RNA, 20 nt, Artificial Sequence
  HTT spacer sequence TTCN PAM
acgcccuaauaaacauuuga

SEQ ID NO: 37959 - RNA, 20 nt, Artificial Sequence
  HTT spacer sequence TTCN PAM
aggagcucauaagucaggag

SEQ ID NO: 37960 - RNA, 20 nt, Artificial Sequence
  HTT spacer sequence TTCN PAM
augacaggucauugcuccug

SEQ ID NO: 37961 - RNA, 20 nt, Artificial Sequence
  HTT spacer sequence TTCN PAM
gccuucuaugacaggucauu

SEQ ID NO: 37962 - RNA, 20 nt, Artificial Sequence
  HTT spacer sequence TTCN PAM
agggaagggggcguggaggc

SEQ ID NO: 37963 - RNA, 20 nt, Artificial Sequence
  HTT spacer sequence TTCN PAM
cuggaagcacuugcuccccu

SEQ ID NO: 37964 - RNA, 20 nt, Artificial Sequence
  HTT spacer sequence TTCN PAM
cgggcaccagccucccgcua

SEQ ID NO: 37965 - RNA, 20 nt, Artificial Sequence
  HTT spacer sequence TTCN PAM
gcugggcauccccccaauuc

SEQ ID NO: 37966 - RNA, 20 nt, Artificial Sequence
  HTT spacer sequence TTCN PAM
cacccccccacgccccaggc

SEQ ID NO: 37967 - RNA, 20 nt, Artificial Sequence
  HTT spacer sequence TTCN PAM
ggaaggcacuguucaccaaa

SEQ ID NO: 37968 - RNA, 20 nt, Artificial Sequence
  HTT spacer sequence TTCN PAM
agaaccccaccucggugccc

SEQ ID NO: 37969 - RNA, 20 nt, Artificial Sequence
  HTT spacer sequence TTCN PAM
ccaaaaugcuuaucuggguc

SEQ ID NO: 37970 - RNA, 20 nt, Artificial Sequence
  HTT spacer sequence TTCN PAM
uauucacagaggugggagcu

SEQ ID NO: 37971 - RNA, 20 nt, Artificial Sequence
  HTT spacer sequence TTCN PAM
cagaggugggagcugagggg

SEQ ID NO: 37972 - RNA, 20 nt, Artificial Sequence
  HTT spacer sequence TTCN PAM
cuaugacaaauaagacugca

SEQ ID NO: 37973 - RNA, 20 nt, Artificial Sequence
  HTT spacer sequence TTCN PAM
caggugcccucaucagccac

SEQ ID NO: 37974 - RNA, 20 nt, Artificial Sequence
  HTT spacer sequence TTCN PAM
cguggcugaugagggcaccu

SEQ ID NO: 37975 - RNA, 20 nt, Artificial Sequence
  HTT spacer sequence TTCN PAM
guccucagacuuuggcgcuu

SEQ ID NO: 37976 - RNA, 20 nt, Artificial Sequence
  HTT spacer sequence TTCN PAM
ccugggugugucaagcgcca

SEQ ID NO: 37977 - RNA, 20 nt, Artificial Sequence
  HTT spacer sequence TTCN PAM
uuuaaaaagugcacugagcu

SEQ ID NO: 37978 - RNA, 20 nt, Artificial Sequence
  HTT spacer sequence TTCN PAM
uuucauuuaaaaagugcacu

SEQ ID NO: 37979 - RNA, 20 nt, Artificial Sequence
  HTT spacer sequence TTCN PAM
uuuuuuuuaaaaaaaaauuu

SEQ ID NO: 37980 - RNA, 20 nt, Artificial Sequence
  HTT spacer sequence TTCN PAM
uuguuuuuaucuguuuuauu

SEQ ID NO: 37981 - RNA, 20 nt, Artificial Sequence
  HTT spacer sequence TTCN PAM
uaggucccgcaagcagagga

SEQ ID NO: 37982 - RNA, 20 nt, Artificial Sequence
  HTT spacer sequence TTCN PAM
ucugcuugcgggaccuagga

SEQ ID NO: 37983 - RNA, 20 nt, Artificial Sequence
  HTT spacer sequence TTCN PAM
guauuccagaaaguaguuaa

SEQ ID NO: 37984 - RNA, 20 nt, Artificial Sequence
  HTT spacer sequence TTCN PAM
agaaaguaguuaagagaccu

SEQ ID NO: 37985 - RNA, 20 nt, Artificial Sequence
  HTT spacer sequence TTCN PAM
ggaauacagaacauaaauaa

SEQ ID NO: 37986 - RNA, 20 nt, Artificial Sequence
  HTT spacer sequence TTCN PAM
gcugacuccacucuguccuc

SEQ ID NO: 37987 - RNA, 20 nt, Artificial Sequence
  HTT spacer sequence TTCN PAM
uccugagcauuucagcugac

SEQ ID NO: 37988 - RNA, 20 nt, Artificial Sequence
  HTT spacer sequence TTCN PAM
uggcgucuacuuccuccuga

SEQ ID NO: 37989 - RNA, 20 nt, Artificial Sequence
  HTT spacer sequence TTCN PAM
gggugggagccccgugugca

SEQ ID NO: 37990 - RNA, 20 nt, Artificial Sequence
  HTT spacer sequence TTCN PAM
uagcaggucacauuggucug

SEQ ID NO: 37991 - RNA, 20 nt, Artificial Sequence
  HTT spacer sequence TTCN PAM
guuuccuccucagauaagug

SEQ ID NO: 37992 - RNA, 20 nt, Artificial Sequence
  HTT spacer sequence TTCN PAM
uccucagauaagugaaggga

SEQ ID NO: 37993 - RNA, 20 nt, Artificial Sequence
  HTT spacer sequence TTCN PAM
cuuaucugaggaggaaacag

SEQ ID NO: 37994 - RNA, 20 nt, Artificial Sequence
  HTT spacer sequence TTCN PAM
agggucugggugugguggcu

SEQ ID NO: 37995 - RNA, 20 nt, Artificial Sequence
  HTT spacer sequence TTCN PAM
guuuacauuuuuuuuuaagg

SEQ ID NO: 37996 - RNA, 20 nt, Artificial Sequence
  HTT spacer sequence TTCN PAM
cuccaccccggugcuguguc

SEQ ID NO: 37997 - RNA, 20 nt, Artificial Sequence
  HTT spacer sequence TTCN PAM
cucaccggguuccugauuua

SEQ ID NO: 37998 - RNA, 20 nt, Artificial Sequence
  HTT spacer sequence TTCN PAM
ugauuuagugaaagcaguug

SEQ ID NO: 37999 - RNA, 20 nt, Artificial Sequence
  HTT spacer sequence TTCN PAM
cuaaaucaggaacccgguga

SEQ ID NO: 38000 - RNA, 20 nt, Artificial Sequence
  HTT spacer sequence TTCN PAM
cuuuguagcuuuuguuucug

SEQ ID NO: 38001 - RNA, 20 nt, Artificial Sequence
  HTT spacer sequence TTCN PAM
guggaaaugggucagaauau

SEQ ID NO: 38002 - RNA, 20 nt, Artificial Sequence
  HTT spacer sequence TTCN PAM
acagaaacaaaagcuacaaa

SEQ ID NO: 38003 - RNA, 20 nt, Artificial Sequence
  HTT spacer sequence TTCN PAM
gacccauuuccacagaaaca

SEQ ID NO: 38004 - RNA, 20 nt, Artificial Sequence
  HTT spacer sequence TTCN PAM
aaacaccauauucugaccca

SEQ ID NO: 38005 - RNA, 20 nt, Artificial Sequence
  HTT spacer sequence TTCN PAM
ucuucugaguuccuggccug

SEQ ID NO: 38006 - RNA, 20 nt, Artificial Sequence
  HTT spacer sequence TTCN PAM
gaguuccuggccugcagccu

SEQ ID NO: 38007 - RNA, 20 nt, Artificial Sequence
  HTT spacer sequence TTCN PAM
uggccugcagccuucacagc

SEQ ID NO: 38008 - RNA, 20 nt, Artificial Sequence
  HTT spacer sequence TTCN PAM
cagcagaaacccugugaugu

SEQ ID NO: 38009 - RNA, 20 nt, Artificial Sequence
  HTT spacer sequence TTCN PAM
gcugugaaggcugcaggcca

SEQ ID NO: 38010 - RNA, 20 nt, Artificial Sequence
  HTT spacer sequence TTCN PAM
guucccugcucucugccugu

SEQ ID NO: 38011 - RNA, 20 nt, Artificial Sequence
  HTT spacer sequence TTCN PAM
cugcucucugccuguacugu

SEQ ID NO: 38012 - RNA, 20 nt, Artificial Sequence
  HTT spacer sequence TTCN PAM
gugacaggaagcagggagcu

SEQ ID NO: 38013 - RNA, 20 nt, Artificial Sequence
  HTT spacer sequence TTCN PAM
ugucacugaaaccggcaggc

SEQ ID NO: 38014 - RNA, 20 nt, Artificial Sequence
  HTT spacer sequence TTCN PAM
agacauaguuggaaaaagaa

SEQ ID NO: 38015 - RNA, 20 nt, Artificial Sequence
  HTT spacer sequence TTCN PAM
aacuaugucuagaaaaauac

SEQ ID NO: 38016 - RNA, 20 nt, Artificial Sequence
  HTT spacer sequence TTCN PAM
uuuuccaacuaugucuagaa

SEQ ID NO: 38017 - RNA, 20 nt, Artificial Sequence
  HTT spacer sequence TTCN PAM
guccuuucaccuuugacaga

SEQ ID NO: 38018 - RNA, 20 nt, Artificial Sequence
  HTT spacer sequence TTCN PAM
ccuuugacagauguuuccac

SEQ ID NO: 38019 - RNA, 20 nt, Artificial Sequence
  HTT spacer sequence TTCN PAM
accccaagauaagugaaaau

SEQ ID NO: 38020 - RNA, 20 nt, Artificial Sequence
  HTT spacer sequence TTCN PAM
cuuaucuugggguggaaaca

SEQ ID NO: 38021 - RNA, 20 nt, Artificial Sequence
  HTT spacer sequence TTCN PAM
ugaaaguguuucugaagggc

SEQ ID NO: 38022 - RNA, 20 nt, Artificial Sequence
  HTT spacer sequence TTCN PAM
ugaaaaauacagugcauccu

SEQ ID NO: 38023 - RNA, 20 nt, Artificial Sequence
  HTT spacer sequence TTCN PAM
gaagggcaggcugagaguga

SEQ ID NO: 38024 - RNA, 20 nt, Artificial Sequence
  HTT spacer sequence TTCN PAM
gaaacacuuucaugaaaaau

SEQ ID NO: 38025 - RNA, 20 nt, Artificial Sequence
  HTT spacer sequence TTCN PAM
cuauccccccaaccccgcug

SEQ ID NO: 38026 - RNA, 20 nt, Artificial Sequence
  HTT spacer sequence TTCN PAM
auguuugcguuguguccagc

SEQ ID NO: 38027 - RNA, 20 nt, Artificial Sequence
  HTT spacer sequence TTCN PAM
gccccaguaugaucccauga

SEQ ID NO: 38028 - RNA, 20 nt, Artificial Sequence
  HTT spacer sequence TTCN PAM
gccccagacagggcaggggu

SEQ ID NO: 38029 - RNA, 20 nt, Artificial Sequence
  HTT spacer sequence TTCN PAM
gccccagacagggcaggggu

SEQ ID NO: 38030 - RNA, 20 nt, Artificial Sequence
  HTT spacer sequence TTCN PAM
gccccagacagggcaggggu

SEQ ID NO: 38031 - RNA, 20 nt, Artificial Sequence
  HTT spacer sequence TTCN PAM
gccccagacagggcaggggu

SEQ ID NO: 38032 - RNA, 20 nt, Artificial Sequence
  HTT spacer sequence TTCN PAM
cugucuggggcugaaggaca

SEQ ID NO: 38033 - RNA, 20 nt, Artificial Sequence
  HTT spacer sequence TTCN PAM
gccccagacagggaaggggu

SEQ ID NO: 38034 - RNA, 20 nt, Artificial Sequence
  HTT spacer sequence TTCN PAM
gccccagacagggcaggggu

SEQ ID NO: 38035 - RNA, 20 nt, Artificial Sequence
  HTT spacer sequence TTCN PAM
gccccagacagggcaggggu

SEQ ID NO: 38036 - RNA, 20 nt, Artificial Sequence
  HTT spacer sequence TTCN PAM
gccccagacagggcaggggu

SEQ ID NO: 38037 - RNA, 20 nt, Artificial Sequence
  HTT spacer sequence TTCN PAM
gccccagacagggcaggggu

SEQ ID NO: 38038 - RNA, 20 nt, Artificial Sequence
  HTT spacer sequence TTCN PAM
gccccagacagggcaggggu

SEQ ID NO: 38039 - RNA, 20 nt, Artificial Sequence
  HTT spacer sequence TTCN PAM
gccccagacagggcaggggu

SEQ ID NO: 38040 - RNA, 20 nt, Artificial Sequence
  HTT spacer sequence TTCN PAM
gccccagacagggcaggggu

SEQ ID NO: 38041 - RNA, 20 nt, Artificial Sequence
  HTT spacer sequence TTCN PAM
gccccagacagggcaggggu

SEQ ID NO: 38042 - RNA, 20 nt, Artificial Sequence
  HTT spacer sequence TTCN PAM
gccccagacagggcaggggu

SEQ ID NO: 38043 - RNA, 20 nt, Artificial Sequence
  HTT spacer sequence TTCN PAM
gccccagacagggcaggggu

SEQ ID NO: 38044 - RNA, 20 nt, Artificial Sequence
  HTT spacer sequence TTCN PAM
gccccagacagggcaggggu

SEQ ID NO: 38045 - RNA, 20 nt, Artificial Sequence
  HTT spacer sequence TTCN PAM
gccccagacagggcaggggu

SEQ ID NO: 38046 - RNA, 20 nt, Artificial Sequence
  HTT spacer sequence TTCN PAM
gccccagacagggcaggggu

SEQ ID NO: 38047 - RNA, 20 nt, Artificial Sequence
  HTT spacer sequence TTCN PAM
caaaagcaaguagcggcuca

SEQ ID NO: 38048 - RNA, 20 nt, Artificial Sequence
  HTT spacer sequence TTCN PAM
uacagacuccucgcccacuc

SEQ ID NO: 38049 - RNA, 20 nt, Artificial Sequence
  HTT spacer sequence TTCN PAM
ccccugggacccagcacccu

SEQ ID NO: 38050 - RNA, 20 nt, Artificial Sequence
  HTT spacer sequence TTCN PAM
uggcaccaagggccauuucc

SEQ ID NO: 38051 - RNA, 20 nt, Artificial Sequence
  HTT spacer sequence TTCN PAM
ccaucaucacuggcacuagc

SEQ ID NO: 38052 - RNA, 20 nt, Artificial Sequence
  HTT spacer sequence TTCN PAM
cgagaaccaggcagaaagga

SEQ ID NO: 38053 - RNA, 20 nt, Artificial Sequence
  HTT spacer sequence TTCN PAM
cgggaagccucgagcacuug

SEQ ID NO: 38054 - RNA, 20 nt, Artificial Sequence
  HTT spacer sequence TTCN PAM
gccugguucucgggaagccu

SEQ ID NO: 38055 - RNA, 20 nt, Artificial Sequence
  HTT spacer sequence TTCN PAM
agucucccgcacuggcaguc

SEQ ID NO: 38056 - RNA, 20 nt, Artificial Sequence
  HTT spacer sequence TTCN PAM
uuuuccagucucccgcacug

SEQ ID NO: 38057 - RNA, 20 nt, Artificial Sequence
  HTT spacer sequence TTCN PAM
guguuuuggggacuccauuc

SEQ ID NO: 38058 - RNA, 20 nt, Artificial Sequence
  HTT spacer sequence TTCN PAM
gaugucacuuaggagugaaa

SEQ ID NO: 38059 - RNA, 20 nt, Artificial Sequence
  HTT spacer sequence TTCN PAM
cuccuaagugacaucugaau

SEQ ID NO: 38060 - RNA, 20 nt, Artificial Sequence
  HTT spacer sequence TTCN PAM
uagagccucuuucuguguca

SEQ ID NO: 38061 - RNA, 20 nt, Artificial Sequence
  HTT spacer sequence TTCN PAM
gugucacccuccucagcugc

SEQ ID NO: 38062 - RNA, 20 nt, Artificial Sequence
  HTT spacer sequence TTCN PAM
ugccuuuagcaugugcugga

SEQ ID NO: 38063 - RNA, 20 nt, Artificial Sequence
  HTT spacer sequence TTCN PAM
cagcagcuguccagccccug

SEQ ID NO: 38064 - RNA, 20 nt, Artificial Sequence
  HTT spacer sequence TTCN PAM
gacaccccagguuacgggca

SEQ ID NO: 38065 - RNA, 20 nt, Artificial Sequence
  HTT spacer sequence TTCN PAM
guggcagguguccauacacu

SEQ ID NO: 38066 - RNA, 20 nt, Artificial Sequence
  HTT spacer sequence TTCN PAM
ccagccacacggaguguaug

SEQ ID NO: 38067 - RNA, 20 nt, Artificial Sequence
  HTT spacer sequence TTCN PAM
uccucccucaggggugugau

SEQ ID NO: 38068 - RNA, 20 nt, Artificial Sequence
  HTT spacer sequence TTCN PAM
ucgucccauuccuccucccu

SEQ ID NO: 38069 - RNA, 20 nt, Artificial Sequence
  HTT spacer sequence TTCN PAM
ucaccacccacgucuccagu

SEQ ID NO: 38070 - RNA, 20 nt, Artificial Sequence
  HTT spacer sequence TTCN PAM
aauggccuuuuucuuuuuaa

SEQ ID NO: 38071 - RNA, 20 nt, Artificial Sequence
  HTT spacer sequence TTCN PAM
uuuuaacagaaauuugaaau

SEQ ID NO: 38072 - RNA, 20 nt, Artificial Sequence
  HTT spacer sequence TTCN PAM
guuaaaaagaaaaaggccau

SEQ ID NO: 38073 - RNA, 20 nt, Artificial Sequence
  HTT spacer sequence TTCN PAM
aauuucuguuaaaaagaaaa

SEQ ID NO: 38074 - RNA, 20 nt, Artificial Sequence
  HTT spacer sequence TTCN PAM
uaucagucauuugauuuguu

SEQ ID NO: 38075 - RNA, 20 nt, Artificial Sequence
  HTT spacer sequence TTCN PAM
ugaaaugagccucucaucuc

SEQ ID NO: 38076 - RNA, 20 nt, Artificial Sequence
  HTT spacer sequence TTCN PAM
agaagcaccucaaacaaauc

SEQ ID NO: 38077 - RNA, 20 nt, Artificial Sequence
  HTT spacer sequence TTCN PAM
aaguacaugagaugagaggc

SEQ ID NO: 38078 - RNA, 20 nt, Artificial Sequence
  HTT spacer sequence TTCN PAM
acaggaaacaccgggcugga

SEQ ID NO: 38079 - RNA, 20 nt, Artificial Sequence
  HTT spacer sequence TTCN PAM
uguggaauaugcgagauggg

SEQ ID NO: 38080 - RNA, 20 nt, Artificial Sequence
  HTT spacer sequence TTCN PAM
caguuuuugcuugaguugua

SEQ ID NO: 38081 - RNA, 20 nt, Artificial Sequence
  HTT spacer sequence TTCN PAM
cauuccccucacaccugcac

SEQ ID NO: 38082 - RNA, 20 nt, Artificial Sequence
  HTT spacer sequence TTCN PAM
ccucacaccugcacgugcca

SEQ ID NO: 38083 - RNA, 20 nt, Artificial Sequence
  HTT spacer sequence TTCN PAM
uacacccaagagacauuacu

SEQ ID NO: 38084 - RNA, 20 nt, Artificial Sequence
  HTT spacer sequence TTCN PAM
ggaugcguugccuggauucu

SEQ ID NO: 38085 - RNA, 20 nt, Artificial Sequence
  HTT spacer sequence TTCN PAM
aacagcgcgauucuccccuu

SEQ ID NO: 38086 - RNA, 20 nt, Artificial Sequence
  HTT spacer sequence TTCN PAM
ccccuugcccuccugguuuu

SEQ ID NO: 38087 - RNA, 20 nt, Artificial Sequence
  HTT spacer sequence TTCN PAM
acaucuccagcuucuagugg

SEQ ID NO: 38088 - RNA, 20 nt, Artificial Sequence
  HTT spacer sequence TTCN PAM
aguggucucagacuuguuca

SEQ ID NO: 38089 - RNA, 20 nt, Artificial Sequence
  HTT spacer sequence TTCN PAM
ccgagcgcaaccaguuugag

SEQ ID NO: 38090 - RNA, 20 nt, Artificial Sequence
  HTT spacer sequence TTCN PAM
gucagcgucacauacaucag

SEQ ID NO: 38091 - RNA, 20 nt, Artificial Sequence
  HTT spacer sequence TTCN PAM
caguucugucagcgucacau

SEQ ID NO: 38092 - RNA, 20 nt, Artificial Sequence
  HTT spacer sequence TTCN PAM
gaagacgagauccucgcuca

SEQ ID NO: 38093 - RNA, 20 nt, Artificial Sequence
  HTT spacer sequence TTCN PAM
gaagggugcacccuucgcag

SEQ ID NO: 38094 - RNA, 20 nt, Artificial Sequence
  HTT spacer sequence TTCN PAM
gugcugaagccacgggggcc

SEQ ID NO: 38095 - RNA, 20 nt, Artificial Sequence
  HTT spacer sequence TTCN PAM
gcacagaaaccucugugcca

SEQ ID NO: 38096 - RNA, 20 nt, Artificial Sequence
  HTT spacer sequence TTCN PAM
aagaguugacccgaaccgga

SEQ ID NO: 38097 - RNA, 20 nt, Artificial Sequence
  HTT spacer sequence TTCN PAM
ggucaacucuuggaaggagg

SEQ ID NO: 38098 - RNA, 20 nt, Artificial Sequence
  HTT spacer sequence TTCN PAM
cagauggaggggguucagcg

SEQ ID NO: 38099 - RNA, 20 nt, Artificial Sequence
  HTT spacer sequence TTCN PAM
gcgacggucagugccauuca

SEQ ID NO: 38100 - RNA, 20 nt, Artificial Sequence
  HTT spacer sequence TTCN PAM
caggucacugugaugugggu

SEQ ID NO: 38101 - RNA, 20 nt, Artificial Sequence
  HTT spacer sequence TTCN PAM
guggggaugggcuacuacaa

SEQ ID NO: 38102 - RNA, 20 nt, Artificial Sequence
  HTT spacer sequence TTCN PAM
accaucuacgaugccucagc

SEQ ID NO: 38103 - RNA, 20 nt, Artificial Sequence
  HTT spacer sequence TTCN PAM
ccaugcucugcccugaggcc

SEQ ID NO: 38104 - RNA, 20 nt, Artificial Sequence
  HTT spacer sequence TTCN PAM
caguuauguuccaggccccc

SEQ ID NO: 38105 - RNA, 20 nt, Artificial Sequence
  HTT spacer sequence TTCN PAM
aggccccccgagcuuccugg

SEQ ID NO: 38106 - RNA, 20 nt, Artificial Sequence
  HTT spacer sequence TTCN PAM
uggcuggacagcuucucucc

SEQ ID NO: 38107 - RNA, 20 nt, Artificial Sequence
  HTT spacer sequence TTCN PAM
cuccugggggccguuuuguc

SEQ ID NO: 38108 - RNA, 20 nt, Artificial Sequence
  HTT spacer sequence TTCN PAM
agucccaaaucugggugcua

SEQ ID NO: 38109 - RNA, 20 nt, Artificial Sequence
  HTT spacer sequence TTCN PAM
acuguuuauaaauuacccag

SEQ ID NO: 38110 - RNA, 20 nt, Artificial Sequence
  HTT spacer sequence TTCN PAM
caccguucugggggcuggaa

SEQ ID NO: 38111 - RNA, 20 nt, Artificial Sequence
  HTT spacer sequence TTCN PAM
gggggcuggaaguuuucaug

SEQ ID NO: 38112 - RNA, 20 nt, Artificial Sequence
  HTT spacer sequence TTCN PAM
agcccccagaacggugagaa

SEQ ID NO: 38113 - RNA, 20 nt, Artificial Sequence
  HTT spacer sequence TTCN PAM
uggucaaggugccagcagau

SEQ ID NO: 38114 - RNA, 20 nt, Artificial Sequence
  HTT spacer sequence TTCN PAM
uagauggcaucuucuggcug

SEQ ID NO: 38115 - RNA, 20 nt, Artificial Sequence
  HTT spacer sequence TTCN PAM
ggcuggguccucacggugga

SEQ ID NO: 38116 - RNA, 20 nt, Artificial Sequence
  HTT spacer sequence TTCN PAM
accgugaggacccagccaga

SEQ ID NO: 38117 - RNA, 20 nt, Artificial Sequence
  HTT spacer sequence TTCN PAM
cuccuuccaccgugaggacc

SEQ ID NO: 38118 - RNA, 20 nt, Artificial Sequence
  HTT spacer sequence TTCN PAM
aaaaggccugagggagcuug

SEQ ID NO: 38119 - RNA, 20 nt, Artificial Sequence
  HTT spacer sequence TTCN PAM
uguacuguggcacugcaaau

SEQ ID NO: 38120 - RNA, 20 nt, Artificial Sequence
  HTT spacer sequence TTCN PAM
ggagggauagaaacauucag

SEQ ID NO: 38121 - RNA, 20 nt, Artificial Sequence
  HTT spacer sequence TTCN PAM
aucccuccugaaacuccuac

SEQ ID NO: 38122 - RNA, 20 nt, Artificial Sequence
  HTT spacer sequence TTCN PAM
gaccaucccagcggucaagu

SEQ ID NO: 38123 - RNA, 20 nt, Artificial Sequence
  HTT spacer sequence TTCN PAM
uccucuugaguuccuccuua

SEQ ID NO: 38124 - RNA, 20 nt, Artificial Sequence
  HTT spacer sequence TTCN PAM
uccuuauucugcuucugguu

SEQ ID NO: 38125 - RNA, 20 nt, Artificial Sequence
  HTT spacer sequence TTCN PAM
gcuucugguuuaucaggauu

SEQ ID NO: 38126 - RNA, 20 nt, Artificial Sequence
  HTT spacer sequence TTCN PAM
gguuuaucaggauucagcca

SEQ ID NO: 38127 - RNA, 20 nt, Artificial Sequence
  HTT spacer sequence TTCN PAM
gccagugcagcaugguaccu

SEQ ID NO: 38128 - RNA, 20 nt, Artificial Sequence
  HTT spacer sequence TTCN PAM
guggcacaucaccacauggu

SEQ ID NO: 38129 - RNA, 20 nt, Artificial Sequence
  HTT spacer sequence TTCN PAM
cgugugcaggugauggauac

SEQ ID NO: 38130 - RNA, 20 nt, Artificial Sequence
  HTT spacer sequence TTCN PAM
ccagaugucgggacccacgg

SEQ ID NO: 38131 - RNA, 20 nt, Artificial Sequence
  HTT spacer sequence TTCN PAM
aggauggcagaacugucaga

SEQ ID NO: 38132 - RNA, 20 nt, Artificial Sequence
  HTT spacer sequence TTCN PAM
gccauccuugaauaugcuuc

SEQ ID NO: 38133 - RNA, 20 nt, Artificial Sequence
  HTT spacer sequence TTCN PAM
uugucauguggcauuaccua

SEQ ID NO: 38134 - RNA, 20 nt, Artificial Sequence
  HTT spacer sequence TTCN PAM
auugcuaucauaaaauggau

SEQ ID NO: 38135 - RNA, 20 nt, Artificial Sequence
  HTT spacer sequence TTCN PAM
ucaacaaacaccugaguggc

SEQ ID NO: 38136 - RNA, 20 nt, Artificial Sequence
  HTT spacer sequence TTCN PAM
acaaacaccugaguggcugc

SEQ ID NO: 38137 - RNA, 20 nt, Artificial Sequence
  HTT spacer sequence TTCN PAM
caccaagggccccagacggc

SEQ ID NO: 38138 - RNA, 20 nt, Artificial Sequence
  HTT spacer sequence TTCN PAM
ugacacacaggagcccgucc

SEQ ID NO: 38139 - RNA, 20 nt, Artificial Sequence
  HTT spacer sequence TTCN PAM
ccgucaugacagcauugucg

SEQ ID NO: 38140 - RNA, 20 nt, Artificial Sequence
  HTT spacer sequence TTCN PAM
ucccgcacccccaccugaca

SEQ ID NO: 38141 - RNA, 20 nt, Artificial Sequence
  HTT spacer sequence TTCN PAM
cuuguggguguccuucagcc

SEQ ID NO: 38142 - RNA, 20 nt, Artificial Sequence
  HTT spacer sequence TTCN PAM
gccuggugccaugcugguga

SEQ ID NO: 38143 - RNA, 20 nt, Artificial Sequence
  HTT spacer sequence TTCN PAM
acucccuggacggcugcuga

SEQ ID NO: 38144 - RNA, 20 nt, Artificial Sequence
  HTT spacer sequence TTCN PAM
cugugugggcaucucucuuc

SEQ ID NO: 38145 - RNA, 20 nt, Artificial Sequence
  HTT spacer sequence TTCN PAM
cggcgaacacccucugggug

SEQ ID NO: 38146 - RNA, 20 nt, Artificial Sequence
  HTT spacer sequence TTCN PAM
ccgugaagagagaugcccac

SEQ ID NO: 38147 - RNA, 20 nt, Artificial Sequence
  HTT spacer sequence TTCN PAM
aagagccgcuuugacaucgu

SEQ ID NO: 38148 - RNA, 20 nt, Artificial Sequence
  HTT spacer sequence TTCN PAM
ccuuugugggaaguuucagc

SEQ ID NO: 38149 - RNA, 20 nt, Artificial Sequence
  HTT spacer sequence TTCN PAM
cacaaaggagaaggaccccu

SEQ ID NO: 38150 - RNA, 20 nt, Artificial Sequence
  HTT spacer sequence TTCN PAM
gcugcugggcuaacuugaau

SEQ ID NO: 38151 - RNA, 20 nt, Artificial Sequence
  HTT spacer sequence TTCN PAM
aguuagcccagcagcugaaa

SEQ ID NO: 38152 - RNA, 20 nt, Artificial Sequence
  HTT spacer sequence TTCN PAM
cauuugauuacugauggcac

SEQ ID NO: 38153 - RNA, 20 nt, Artificial Sequence
  HTT spacer sequence TTCN PAM
aaaugauuauuucucauuug

SEQ ID NO: 38154 - RNA, 20 nt, Artificial Sequence
  HTT spacer sequence TTCN PAM
ggaagauggccauccucugu

SEQ ID NO: 38155 - RNA, 20 nt, Artificial Sequence
  HTT spacer sequence TTCN PAM
agaaagcaugagugcacaaa

SEQ ID NO: 38156 - RNA, 20 nt, Artificial Sequence
  HTT spacer sequence TTCN PAM
cagaggauggccaucuucca

SEQ ID NO: 38157 - RNA, 20 nt, Artificial Sequence
  HTT spacer sequence TTCN PAM
gcgcgucaugcuugguaccc

SEQ ID NO: 38158 - RNA, 20 nt, Artificial Sequence
  HTT spacer sequence TTCN PAM
caacggugggcaaauaccuc

SEQ ID NO: 38159 - RNA, 20 nt, Artificial Sequence
  HTT spacer sequence TTCN PAM
gaagugggaccuggggccgu

SEQ ID NO: 38160 - RNA, 20 nt, Artificial Sequence
  HTT spacer sequence TTCN PAM
gaaagccccacaucaggacc

SEQ ID NO: 38161 - RNA, 20 nt, Artificial Sequence
  HTT spacer sequence TTCN PAM
ugggcccccaccucacccug

SEQ ID NO: 38162 - RNA, 20 nt, Artificial Sequence
  HTT spacer sequence TTCN PAM
uucuugggcccccaccucac

SEQ ID NO: 38163 - RNA, 20 nt, Artificial Sequence
  HTT spacer sequence TTCN PAM
uugugggucacuuccuucuu

SEQ ID NO: 38164 - RNA, 20 nt, Artificial Sequence
  HTT spacer sequence TTCN PAM
ugggauggcugggaguggcu

SEQ ID NO: 38165 - RNA, 20 nt, Artificial Sequence
  HTT spacer sequence TTCN PAM
gugucguccggccauuuccc

SEQ ID NO: 38166 - RNA, 20 nt, Artificial Sequence
  HTT spacer sequence TTCN PAM
ccugcggagaggcuccuacc

SEQ ID NO: 38167 - RNA, 20 nt, Artificial Sequence
  HTT spacer sequence TTCN PAM
cggcagugguaggagccucu

SEQ ID NO: 38168 - RNA, 20 nt, Artificial Sequence
  HTT spacer sequence TTCN PAM
acaaaaacaagaggccgccu

SEQ ID NO: 38169 - RNA, 20 nt, Artificial Sequence
  HTT spacer sequence TTCN PAM
cauggagcgcuggauggcca

SEQ ID NO: 38170 - RNA, 20 nt, Artificial Sequence
  HTT spacer sequence TTCN PAM
guguccccauagucuugggc

SEQ ID NO: 38171 - RNA, 20 nt, Artificial Sequence
  HTT spacer sequence TTCN PAM
gcccaagacuauggggacac

SEQ ID NO: 38172 - RNA, 20 nt, Artificial Sequence
  HTT spacer sequence TTCN PAM
uugcugacuucugcaggggu

SEQ ID NO: 38173 - RNA, 20 nt, Artificial Sequence
  HTT spacer sequence TTCN PAM
gcaggggucuccucacuguu

SEQ ID NO: 38174 - RNA, 20 nt, Artificial Sequence
  HTT spacer sequence TTCN PAM
aucugcucuuuaacagugag

SEQ ID NO: 38175 - RNA, 20 nt, Artificial Sequence
  HTT spacer sequence TTCN PAM
cuuucaaucugcucuuuaac

SEQ ID NO: 38176 - RNA, 20 nt, Artificial Sequence
  HTT spacer sequence TTCN PAM
ucacuuucaaucugcucuuu

SEQ ID NO: 38177 - RNA, 20 nt, Artificial Sequence
  HTT spacer sequence TTCN PAM
cuuaguauccaaaaccuagc

SEQ ID NO: 38178 - RNA, 20 nt, Artificial Sequence
  HTT spacer sequence TTCN PAM
accaaaauggccucaauuuc

SEQ ID NO: 38179 - RNA, 20 nt, Artificial Sequence
  HTT spacer sequence TTCN PAM
gucaacuucaaccaaaaugg

SEQ ID NO: 38180 - RNA, 20 nt, Artificial Sequence
  HTT spacer sequence TTCN PAM
agaaagacucucagcuaaga

SEQ ID NO: 38181 - RNA, 20 nt, Artificial Sequence
  HTT spacer sequence TTCN PAM
agaaaagccugggguagucu

SEQ ID NO: 38182 - RNA, 20 nt, Artificial Sequence
  HTT spacer sequence TTCN PAM
uugcugauuuuguuuugugu

SEQ ID NO: 38183 - RNA, 20 nt, Artificial Sequence
  HTT spacer sequence TTCN PAM
agaauccucucccagcgggg

SEQ ID NO: 38184 - RNA, 20 nt, Artificial Sequence
  HTT spacer sequence TTCN PAM
ggaagcucaagccugguguc

SEQ ID NO: 38185 - RNA, 20 nt, Artificial Sequence
  HTT spacer sequence TTCN PAM
uggcgacgacacugcacacg

SEQ ID NO: 38186 - RNA, 20 nt, Artificial Sequence
  HTT spacer sequence TTCN PAM
cuccgggaguccagagucug

SEQ ID NO: 38187 - RNA, 20 nt, Artificial Sequence
  HTT spacer sequence TTCN PAM
cagcaccaacccuggugccc

SEQ ID NO: 38188 - RNA, 20 nt, Artificial Sequence
  HTT spacer sequence TTCN PAM
gcacacaagcgugagggcag

SEQ ID NO: 38189 - RNA, 20 nt, Artificial Sequence
  HTT spacer sequence TTCN PAM
gguuggagaggagauagucg

SEQ ID NO: 38190 - RNA, 20 nt, Artificial Sequence
  HTT spacer sequence TTCN PAM
gagacccccgccccagcccc

SEQ ID NO: 38191 - RNA, 20 nt, Artificial Sequence
  HTT spacer sequence TTCN PAM
cagcucauucugagaccccc

SEQ ID NO: 38192 - RNA, 20 nt, Artificial Sequence
  HTT spacer sequence TTCN PAM
uucacagcucauucugagac

SEQ ID NO: 38193 - RNA, 20 nt, Artificial Sequence
  HTT spacer sequence TTCN PAM
cacugauaccuggccugcca

SEQ ID NO: 38194 - RNA, 20 nt, Artificial Sequence
  HTT spacer sequence TTCN PAM
ucgggcaccuccagcgagcu

SEQ ID NO: 38195 - RNA, 20 nt, Artificial Sequence
  HTT spacer sequence TTCN PAM
ugacucugcucucgaggcca

SEQ ID NO: 38196 - RNA, 20 nt, Artificial Sequence
  HTT spacer sequence TTCN PAM
cugcucccagaacccuguua

SEQ ID NO: 38197 - RNA, 20 nt, Artificial Sequence
  HTT spacer sequence TTCN PAM
gggagcagagaaugagagcc

SEQ ID NO: 38198 - RNA, 20 nt, Artificial Sequence
  HTT spacer sequence TTCN PAM
ccgcccuggcccaguaccuc

SEQ ID NO: 38199 - RNA, 20 nt, Artificial Sequence
  HTT spacer sequence TTCN PAM
acugugauuccgaccucacc

SEQ ID NO: 38200 - RNA, 20 nt, Artificial Sequence
  HTT spacer sequence TTCN PAM
gaccucaccuuaucuuaaag

SEQ ID NO: 38201 - RNA, 20 nt, Artificial Sequence
  HTT spacer sequence TTCN PAM
guacacacguguccuugaca

SEQ ID NO: 38202 - RNA, 20 nt, Artificial Sequence
  HTT spacer sequence TTCN PAM
cagcgaugucuuacaagcgc

SEQ ID NO: 38203 - RNA, 20 nt, Artificial Sequence
  HTT spacer sequence TTCN PAM
aaagucgcagaggcuuuagc

SEQ ID NO: 38204 - RNA, 20 nt, Artificial Sequence
  HTT spacer sequence TTCN PAM
gcacacgggagcugucuuua

SEQ ID NO: 38205 - RNA, 20 nt, Artificial Sequence
  HTT spacer sequence TTCN PAM
acccucccucuaaagacagc

SEQ ID NO: 38206 - RNA, 20 nt, Artificial Sequence
  HTT spacer sequence TTCN PAM
ucagccacccacauggggga

SEQ ID NO: 38207 - RNA, 20 nt, Artificial Sequence
  HTT spacer sequence TTCN PAM
ugcccucaacucccccaugu

SEQ ID NO: 38208 - RNA, 20 nt, Artificial Sequence
  HTT spacer sequence TTCN PAM
caucuuugcuccuaauucuu

SEQ ID NO: 38209 - RNA, 20 nt, Artificial Sequence
  HTT spacer sequence TTCN PAM
ucccagaccccuucccaucu

SEQ ID NO: 38210 - RNA, 20 nt, Artificial Sequence
  HTT spacer sequence TTCN PAM
ugcccacuugucaaagggga

SEQ ID NO: 38211 - RNA, 20 nt, Artificial Sequence
  HTT spacer sequence TTCN PAM
acucaacuuugaccuagccc

SEQ ID NO: 38212 - RNA, 20 nt, Artificial Sequence
  HTT spacer sequence TTCN PAM
cgucucccuccaggucuucc

SEQ ID NO: 38213 - RNA, 20 nt, Artificial Sequence
  HTT spacer sequence TTCN PAM
gacaggagggaggugugagc

SEQ ID NO: 38214 - RNA, 20 nt, Artificial Sequence
  HTT spacer sequence TTCN PAM
cgccugucauccuugcuggg

SEQ ID NO: 38215 - RNA, 20 nt, Artificial Sequence
  HTT spacer sequence TTCN PAM
ggggcugccccccaaaauca

SEQ ID NO: 38216 - RNA, 20 nt, Artificial Sequence
  HTT spacer sequence TTCN PAM
auggcucuugcugugggcau

SEQ ID NO: 38217 - RNA, 20 nt, Artificial Sequence
  HTT spacer sequence TTCN PAM
cugaguccuccaugcccaca

SEQ ID NO: 38218 - RNA, 20 nt, Artificial Sequence
  HTT spacer sequence TTCN PAM
accuggaugccacaagcucu

SEQ ID NO: 38219 - RNA, 20 nt, Artificial Sequence
  HTT spacer sequence TTCN PAM
caguggccacucauucaguc

SEQ ID NO: 38220 - RNA, 20 nt, Artificial Sequence
  HTT spacer sequence TTCN PAM
gucccuggcuaccagguccu

SEQ ID NO: 38221 - RNA, 20 nt, Artificial Sequence
  HTT spacer sequence TTCN PAM
ccauggcacagugaggaccu

SEQ ID NO: 38222 - RNA, 20 nt, Artificial Sequence
  HTT spacer sequence TTCN PAM
gugaucccccgacagcgccg

SEQ ID NO: 38223 - RNA, 20 nt, Artificial Sequence
  HTT spacer sequence TTCN PAM
uggcacaugccaucaugacg

SEQ ID NO: 38224 - RNA, 20 nt, Artificial Sequence
  HTT spacer sequence TTCN PAM
uucauggcacaugccaucau

SEQ ID NO: 38225 - RNA, 20 nt, Artificial Sequence
  HTT spacer sequence TTCN PAM
ugagugcccugugcuuuucc

SEQ ID NO: 38226 - RNA, 20 nt, Artificial Sequence
  HTT spacer sequence TTCN PAM
cacaccccaggccagucccc

SEQ ID NO: 38227 - RNA, 20 nt, Artificial Sequence
  HTT spacer sequence TTCN PAM
ucucucugucccucaacgag

SEQ ID NO: 38228 - RNA, 20 nt, Artificial Sequence
  HTT spacer sequence TTCN PAM
gccucugcuugaccacuccc

SEQ ID NO: 38229 - RNA, 20 nt, Artificial Sequence
  HTT spacer sequence TTCN PAM
cagcauguccggccccacgc

SEQ ID NO: 38230 - RNA, 20 nt, Artificial Sequence
  HTT spacer sequence TTCN PAM
gcugcgugaacauucacagc

SEQ ID NO: 38231 - RNA, 20 nt, Artificial Sequence
  HTT spacer sequence TTCN PAM
cgcagcugaaaacgggagac

SEQ ID NO: 38232 - RNA, 20 nt, Artificial Sequence
  HTT spacer sequence TTCN PAM
cagccagcagcacguacugg

SEQ ID NO: 38233 - RNA, 20 nt, Artificial Sequence
  HTT spacer sequence TTCN PAM
caaugagguaaaacgcagug

SEQ ID NO: 38234 - RNA, 20 nt, Artificial Sequence
  HTT spacer sequence TTCN PAM
ggcccuacguccagaggaua

SEQ ID NO: 38235 - RNA, 20 nt, Artificial Sequence
  HTT spacer sequence TTCN PAM
gcaucaauaauacaggugag

SEQ ID NO: 38236 - RNA, 20 nt, Artificial Sequence
  HTT spacer sequence TTCN PAM
ucugcacacggggagugggc

SEQ ID NO: 38237 - RNA, 20 nt, Artificial Sequence
  HTT spacer sequence TTCN PAM
cuucucuuuuccuugcagga

SEQ ID NO: 38238 - RNA, 20 nt, Artificial Sequence
  HTT spacer sequence TTCN PAM
cuuuuccuugcaggaucaua

SEQ ID NO: 38239 - RNA, 20 nt, Artificial Sequence
  HTT spacer sequence TTCN PAM
uugcaggaucauaccagugg

SEQ ID NO: 38240 - RNA, 20 nt, Artificial Sequence
  HTT spacer sequence TTCN PAM
ugccuccucccgaccaaguc

SEQ ID NO: 38241 - RNA, 20 nt, Artificial Sequence
  HTT spacer sequence TTCN PAM
uugacacagaggccuuucuc

SEQ ID NO: 38242 - RNA, 20 nt, Artificial Sequence
  HTT spacer sequence TTCN PAM
cccugugcagaugugugggg

SEQ ID NO: 38243 - RNA, 20 nt, Artificial Sequence
  HTT spacer sequence TTCN PAM
agacagcaucaccccacaca

SEQ ID NO: 38244 - RNA, 20 nt, Artificial Sequence
  HTT spacer sequence TTCN PAM
gcauccaggcgggagagcug

SEQ ID NO: 38245 - RNA, 20 nt, Artificial Sequence
  HTT spacer sequence TTCN PAM
cucuguccacacucagcuug

SEQ ID NO: 38246 - RNA, 20 nt, Artificial Sequence
  HTT spacer sequence TTCN PAM
agggaggcaggagcaugcuc

SEQ ID NO: 38247 - RNA, 20 nt, Artificial Sequence
  HTT spacer sequence TTCN PAM
cacuucugguguugccccaa

SEQ ID NO: 38248 - RNA, 20 nt, Artificial Sequence
  HTT spacer sequence TTCN PAM
gguguugccccaagccggcc

SEQ ID NO: 38249 - RNA, 20 nt, Artificial Sequence
  HTT spacer sequence TTCN PAM
ugcaaggugauggggccggc

SEQ ID NO: 38250 - RNA, 20 nt, Artificial Sequence
  HTT spacer sequence TTCN PAM
gaucuccagggacucacugg

SEQ ID NO: 38251 - RNA, 20 nt, Artificial Sequence
  HTT spacer sequence TTCN PAM
uacugaacacuuuuguuaca

SEQ ID NO: 38252 - RNA, 20 nt, Artificial Sequence
  HTT spacer sequence TTCN PAM
guacgaagguuaccucuaua

SEQ ID NO: 38253 - RNA, 20 nt, Artificial Sequence
  HTT spacer sequence TTCN PAM
uguaacaaaaguguucagua

SEQ ID NO: 38254 - RNA, 20 nt, Artificial Sequence
  HTT spacer sequence TTCN PAM
ccuuuccuguaacaaaagug

SEQ ID NO: 38255 - RNA, 20 nt, Artificial Sequence
  HTT spacer sequence TTCN PAM
acccggacugacuuucuccu

SEQ ID NO: 38256 - RNA, 20 nt, Artificial Sequence
  HTT spacer sequence TTCN PAM
gacccuaauccugcagcccc

SEQ ID NO: 38257 - RNA, 20 nt, Artificial Sequence
  HTT spacer sequence TTCN PAM
uuuugauagguaagaagcga

SEQ ID NO: 38258 - RNA, 20 nt, Artificial Sequence
  HTT spacer sequence TTCN PAM
uaccuaucaaaaagaacaga

SEQ ID NO: 38259 - RNA, 20 nt, Artificial Sequence
  HTT spacer sequence TTCN PAM
cuucuuaccuaucaaaaaga

SEQ ID NO: 38260 - RNA, 20 nt, Artificial Sequence
  HTT spacer sequence TTCN PAM
cuagaacuuuggccugaagc

SEQ ID NO: 38261 - RNA, 20 nt, Artificial Sequence
  HTT spacer sequence TTCN PAM
agggaagcuaacggcugagg

SEQ ID NO: 38262 - RNA, 20 nt, Artificial Sequence
  HTT spacer sequence TTCN PAM
ggccaaaguucuagggaagc

SEQ ID NO: 38263 - RNA, 20 nt, Artificial Sequence
  HTT spacer sequence TTCN PAM
ccaccacagccugaccaugg

SEQ ID NO: 38264 - RNA, 20 nt, Artificial Sequence
  HTT spacer sequence TTCN PAM
acuggcgagcuggugguccu

SEQ ID NO: 38265 - RNA, 20 nt, Artificial Sequence
  HTT spacer sequence TTCN PAM
aagguugucccagugccugc

SEQ ID NO: 38266 - RNA, 20 nt, Artificial Sequence
  HTT spacer sequence TTCN PAM
ugcccccugccacaccccca

SEQ ID NO: 38267 - RNA, 20 nt, Artificial Sequence
  HTT spacer sequence TTCN PAM
gccccacccucccagaggcu

SEQ ID NO: 38268 - RNA, 20 nt, Artificial Sequence
  HTT spacer sequence TTCN PAM
uccuccugccgcugcuccuc

SEQ ID NO: 38269 - RNA, 20 nt, Artificial Sequence
  HTT spacer sequence TTCN PAM
accuucauccuccugccgcu

SEQ ID NO: 38270 - RNA, 20 nt, Artificial Sequence
  HTT spacer sequence TTCN PAM
gccccccaccaccccccacu

SEQ ID NO: 38271 - RNA, 20 nt, Artificial Sequence
  HTT spacer sequence TTCN PAM
augcacgcacagcagugggg

SEQ ID NO: 38272 - RNA, 20 nt, Artificial Sequence
  HTT spacer sequence TTCN PAM
cucaccugcucuggaagugg

SEQ ID NO: 38273 - RNA, 20 nt, Artificial Sequence
  HTT spacer sequence TTCN PAM
agagcaggugagggaagcca

SEQ ID NO: 38274 - RNA, 20 nt, Artificial Sequence
  HTT spacer sequence TTCN PAM
caaggacaagggccccugau

SEQ ID NO: 38275 - RNA, 20 nt, Artificial Sequence
  HTT spacer sequence TTCN PAM
caagagcauacucaggugga

SEQ ID NO: 38276 - RNA, 20 nt, Artificial Sequence
  HTT spacer sequence TTCN PAM
gaacagccaagccugugcug

SEQ ID NO: 38277 - RNA, 20 nt, Artificial Sequence
  HTT spacer sequence TTCN PAM
gaaugccucaucuggucaaa

SEQ ID NO: 38278 - RNA, 20 nt, Artificial Sequence
  HTT spacer sequence TTCN PAM
uguugauuuuuuuuuuucuu

SEQ ID NO: 38279 - RNA, 20 nt, Artificial Sequence
  HTT spacer sequence TTCN PAM
uuucuuuuugagauggaguu

SEQ ID NO: 38280 - RNA, 20 nt, Artificial Sequence
  HTT spacer sequence TTCN PAM
uuuugagauggaguuuuucc

SEQ ID NO: 38281 - RNA, 20 nt, Artificial Sequence
  HTT spacer sequence TTCN PAM
cuugucacccaggcuggagu

SEQ ID NO: 38282 - RNA, 20 nt, Artificial Sequence
  HTT spacer sequence TTCN PAM
agugauucuccugccucagc

SEQ ID NO: 38283 - RNA, 20 nt, Artificial Sequence
  HTT spacer sequence TTCN PAM
ccugccucagccucccuagu

SEQ ID NO: 38284 - RNA, 20 nt, Artificial Sequence
  HTT spacer sequence TTCN PAM
ccguguuggcugggcugguc

SEQ ID NO: 38285 - RNA, 20 nt, Artificial Sequence
  HTT spacer sequence TTCN PAM
agaccagcccagccaacacg

SEQ ID NO: 38286 - RNA, 20 nt, Artificial Sequence
  HTT spacer sequence TTCN PAM
ggaguucgagaccagcccag

SEQ ID NO: 38287 - RNA, 20 nt, Artificial Sequence
  HTT spacer sequence TTCN PAM
ucaguccccauaugcucacu

SEQ ID NO: 38288 - RNA, 20 nt, Artificial Sequence
  HTT spacer sequence TTCN PAM
guccccauaugcucacugag

SEQ ID NO: 38289 - RNA, 20 nt, Artificial Sequence
  HTT spacer sequence TTCN PAM
aggggcuuguggucuagugg

SEQ ID NO: 38290 - RNA, 20 nt, Artificial Sequence
  HTT spacer sequence TTCN PAM
gcuugaccgcucuccagacg

SEQ ID NO: 38291 - RNA, 20 nt, Artificial Sequence
  HTT spacer sequence TTCN PAM
cucuguggagcagugucuuc

SEQ ID NO: 38292 - RNA, 20 nt, Artificial Sequence
  HTT spacer sequence TTCN PAM
gagcggcugccaugccacug

SEQ ID NO: 38293 - RNA, 20 nt, Artificial Sequence
  HTT spacer sequence TTCN PAM
ucacaggugcuccuggcucu

SEQ ID NO: 38294 - RNA, 20 nt, Artificial Sequence
  HTT spacer sequence TTCN PAM
uagcugcuucccgugugucu

SEQ ID NO: 38295 - RNA, 20 nt, Artificial Sequence
  HTT spacer sequence TTCN PAM
cgugugucucaguuacacac

SEQ ID NO: 38296 - RNA, 20 nt, Artificial Sequence
  HTT spacer sequence TTCN PAM
cgucucaucagugcacacau

SEQ ID NO: 38297 - RNA, 20 nt, Artificial Sequence
  HTT spacer sequence TTCN PAM
gcacugaaagggauacugcu

SEQ ID NO: 38298 - RNA, 20 nt, Artificial Sequence
  HTT spacer sequence TTCN PAM
gugcugaaaagcaaccauca

SEQ ID NO: 38299 - RNA, 20 nt, Artificial Sequence
  HTT spacer sequence TTCN PAM
ggaucugguuagggaagaag

SEQ ID NO: 38300 - RNA, 20 nt, Artificial Sequence
  HTT spacer sequence TTCN PAM
cuaaccagauccugaaacac

SEQ ID NO: 38301 - RNA, 20 nt, Artificial Sequence
  HTT spacer sequence TTCN PAM
ucccuaaccagauccugaaa

SEQ ID NO: 38302 - RNA, 20 nt, Artificial Sequence
  HTT spacer sequence TTCN PAM
uguuaccacacagggcccca

SEQ ID NO: 38303 - RNA, 20 nt, Artificial Sequence
  HTT spacer sequence TTCN PAM
uggcacuguugucaaccagg

SEQ ID NO: 38304 - RNA, 20 nt, Artificial Sequence
  HTT spacer sequence TTCN PAM
aacgcuucguggcacuguug

SEQ ID NO: 38305 - RNA, 20 nt, Artificial Sequence
  HTT spacer sequence TTCN PAM
acaugcaaaugcuccacaaa

SEQ ID NO: 38306 - RNA, 20 nt, Artificial Sequence
  HTT spacer sequence TTCN PAM
cauuauguuuuugcugcuuu

SEQ ID NO: 38307 - RNA, 20 nt, Artificial Sequence
  HTT spacer sequence TTCN PAM
uuuguuaugauuuuuaaaaa

SEQ ID NO: 38308 - RNA, 20 nt, Artificial Sequence
  HTT spacer sequence TTCN PAM
cgcugcgccguuucugcaua

SEQ ID NO: 38309 - RNA, 20 nt, Artificial Sequence
  HTT spacer sequence TTCN PAM
gcauauuccuuuauguagcu

SEQ ID NO: 38310 - RNA, 20 nt, Artificial Sequence
  HTT spacer sequence TTCN PAM
uuuauguagcuuucaaacuc

SEQ ID NO: 38311 - RNA, 20 nt, Artificial Sequence
  HTT spacer sequence TTCN PAM
aacuccucuuaggaguucug

SEQ ID NO: 38312 - RNA, 20 nt, Artificial Sequence
  HTT spacer sequence TTCN PAM
ggucccuacagggcguggga

SEQ ID NO: 38313 - RNA, 20 nt, Artificial Sequence
  HTT spacer sequence TTCN PAM
aacuccucuuaggaguucug

SEQ ID NO: 38314 - RNA, 20 nt, Artificial Sequence
  HTT spacer sequence TTCN PAM
ggucccuacaggguguggga

SEQ ID NO: 38315 - RNA, 20 nt, Artificial Sequence
  HTT spacer sequence TTCN PAM
ucugucuagcucguggaggc

SEQ ID NO: 38316 - RNA, 20 nt, Artificial Sequence
  HTT spacer sequence TTCN PAM
uacuccaguugcuuaggcuc

SEQ ID NO: 38317 - RNA, 20 nt, Artificial Sequence
  HTT spacer sequence TTCN PAM
ccacuuggaaagucccucac

SEQ ID NO: 38318 - RNA, 20 nt, Artificial Sequence
  HTT spacer sequence TTCN PAM
aaguggggaaagucagagcc

SEQ ID NO: 38319 - RNA, 20 nt, Artificial Sequence
  HTT spacer sequence TTCN PAM
caucggcauuuuccccagua

SEQ ID NO: 38320 - RNA, 20 nt, Artificial Sequence
  HTT spacer sequence TTCN PAM
ccaguauuagagccaaggcc

SEQ ID NO: 38321 - RNA, 20 nt, Artificial Sequence
  HTT spacer sequence TTCN PAM
ugauccugggaggagggacg

SEQ ID NO: 38322 - RNA, 20 nt, Artificial Sequence
  HTT spacer sequence TTCN PAM
uugugaagccagaguggugg

SEQ ID NO: 38323 - RNA, 20 nt, Artificial Sequence
  HTT spacer sequence TTCN PAM
caaggaaagccuuuccugau

SEQ ID NO: 38324 - RNA, 20 nt, Artificial Sequence
  HTT spacer sequence TTCN PAM
agacgacuucuucccacccc

SEQ ID NO: 38325 - RNA, 20 nt, Artificial Sequence
  HTT spacer sequence TTCN PAM
ucccaccccaggacaucaug

SEQ ID NO: 38326 - RNA, 20 nt, Artificial Sequence
  HTT spacer sequence TTCN PAM
caccccaggacaucaugaac

SEQ ID NO: 38327 - RNA, 20 nt, Artificial Sequence
  HTT spacer sequence TTCN PAM
ugauguccuggggugggaag

SEQ ID NO: 38328 - RNA, 20 nt, Artificial Sequence
  HTT spacer sequence TTCN PAM
guccaaccagcagccauacc

SEQ ID NO: 38329 - RNA, 20 nt, Artificial Sequence
  HTT spacer sequence TTCN PAM
uggccaccgugguguauaag

SEQ ID NO: 38330 - RNA, 20 nt, Artificial Sequence
  HTT spacer sequence TTCN PAM
cacuccauccccaucccaca

SEQ ID NO: 38331 - RNA, 20 nt, Artificial Sequence
  HTT spacer sequence TTCN PAM
cagcagauucgccagcagag

SEQ ID NO: 38332 - RNA, 20 nt, Artificial Sequence
  HTT spacer sequence TTCN PAM
ccagcagagcccagcuccuc

SEQ ID NO: 38333 - RNA, 20 nt, Artificial Sequence
  HTT spacer sequence TTCN PAM
cguccccccagcccugacac

SEQ ID NO: 38334 - RNA, 20 nt, Artificial Sequence
  HTT spacer sequence TTCN PAM
gacucugcacagcaccgggc

SEQ ID NO: 38335 - RNA, 20 nt, Artificial Sequence
  HTT spacer sequence TTCN PAM
cgcagagggccccggucgcc

SEQ ID NO: 38336 - RNA, 20 nt, Artificial Sequence
  HTT spacer sequence TTCN PAM
uugucagcgcguccaccagc

SEQ ID NO: 38337 - RNA, 20 nt, Artificial Sequence
  HTT spacer sequence TTCN PAM
cuugucaacaccgaggcuca

SEQ ID NO: 38338 - RNA, 20 nt, Artificial Sequence
  HTT spacer sequence TTCN PAM
ugauaagguuuugaaaccua

SEQ ID NO: 38339 - RNA, 20 nt, Artificial Sequence
  HTT spacer sequence TTCN PAM
aaaccuuaucaugaaacaug

SEQ ID NO: 38340 - RNA, 20 nt, Artificial Sequence
  HTT spacer sequence TTCN PAM
cuggggcugagggccuguca

SEQ ID NO: 38341 - RNA, 20 nt, Artificial Sequence
  HTT spacer sequence TTCN PAM
guaccccugucagcauuuua

SEQ ID NO: 38342 - RNA, 20 nt, Artificial Sequence
  HTT spacer sequence TTCN PAM
guggagggccugggugaggg

SEQ ID NO: 38343 - RNA, 20 nt, Artificial Sequence
  HTT spacer sequence TTCN PAM
ccugacacugcuucucauua

SEQ ID NO: 38344 - RNA, 20 nt, Artificial Sequence
  HTT spacer sequence TTCN PAM
cauuagcuuuggucauugug

SEQ ID NO: 38345 - RNA, 20 nt, Artificial Sequence
  HTT spacer sequence TTCN PAM
ccgagagggcgaucgaggca

SEQ ID NO: 38346 - RNA, 20 nt, Artificial Sequence
  HTT spacer sequence TTCN PAM
cacccccagaugcuggcugc

SEQ ID NO: 38347 - RNA, 20 nt, Artificial Sequence
  HTT spacer sequence TTCN PAM
cuuuccacagcccuucccca

SEQ ID NO: 38348 - RNA, 20 nt, Artificial Sequence
  HTT spacer sequence TTCN PAM
acagcccuuccccaagacag

SEQ ID NO: 38349 - RNA, 20 nt, Artificial Sequence
  HTT spacer sequence TTCN PAM
ccaagacagaccacaagagc

SEQ ID NO: 38350 - RNA, 20 nt, Artificial Sequence
  HTT spacer sequence TTCN PAM
gcuggccuccacuagcccug

SEQ ID NO: 38351 - RNA, 20 nt, Artificial Sequence
  HTT spacer sequence TTCN PAM
ugcaacccuuggcuggcugg

SEQ ID NO: 38352 - RNA, 20 nt, Artificial Sequence
  HTT spacer sequence TTCN PAM
ggggcucugcucgcucucca

SEQ ID NO: 38353 - RNA, 20 nt, Artificial Sequence
  HTT spacer sequence TTCN PAM
ggagaggaacucccagguga

SEQ ID NO: 38354 - RNA, 20 nt, Artificial Sequence
  HTT spacer sequence TTCN PAM
ucuccugaaacagucuacaa

SEQ ID NO: 38355 - RNA, 20 nt, Artificial Sequence
  HTT spacer sequence TTCN PAM
ccucauuugccggccuuuuu

SEQ ID NO: 38356 - RNA, 20 nt, Artificial Sequence
  HTT spacer sequence TTCN PAM
uuaacuccugcaccagccuc

SEQ ID NO: 38357 - RNA, 20 nt, Artificial Sequence
  HTT spacer sequence TTCN PAM
cguccaccugcuccagcuug

SEQ ID NO: 38358 - RNA, 20 nt, Artificial Sequence
  HTT spacer sequence TTCN PAM
gccuggucgccacagacuuc

SEQ ID NO: 38359 - RNA, 20 nt, Artificial Sequence
  HTT spacer sequence TTCN PAM
acagacaccagauagaggag

SEQ ID NO: 38360 - RNA, 20 nt, Artificial Sequence
  HTT spacer sequence TTCN PAM
agucugugcuugaggugguu

SEQ ID NO: 38361 - RNA, 20 nt, Artificial Sequence
  HTT spacer sequence TTCN PAM
uggggcugcaaccaccucaa

SEQ ID NO: 38362 - RNA, 20 nt, Artificial Sequence
  HTT spacer sequence TTCN PAM
uaaacaagucagcagccggu

SEQ ID NO: 38363 - RNA, 20 nt, Artificial Sequence
  HTT spacer sequence TTCN PAM
aaaggcuccggccccagcug

SEQ ID NO: 38364 - RNA, 20 nt, Artificial Sequence
  HTT spacer sequence TTCN PAM
gcacaugccgcgggcggcca

SEQ ID NO: 38365 - RNA, 20 nt, Artificial Sequence
  HTT spacer sequence TTCN PAM
gccacauggcagagacacgc

SEQ ID NO: 38366 - RNA, 20 nt, Artificial Sequence
  HTT spacer sequence TTCN PAM
agaaagcaggagcagcugug

SEQ ID NO: 38367 - RNA, 20 nt, Artificial Sequence
  HTT spacer sequence TTCN PAM
ggaaggccucaggcucagcc

SEQ ID NO: 38368 - RNA, 20 nt, Artificial Sequence
  HTT spacer sequence TTCN PAM
ccugauagucaccugcuggu

SEQ ID NO: 38369 - RNA, 20 nt, Artificial Sequence
  HTT spacer sequence TTCN PAM
ggcccagaugcaagagcagc

SEQ ID NO: 38370 - RNA, 20 nt, Artificial Sequence
  HTT spacer sequence TTCN PAM
acugcaggacagcagagggg

SEQ ID NO: 38371 - RNA, 20 nt, Artificial Sequence
  HTT spacer sequence TTCN PAM
caaagccugcucacggcacc

SEQ ID NO: 38372 - RNA, 20 nt, Artificial Sequence
  HTT spacer sequence TTCN PAM
cccuucucucuuuucuucuc

SEQ ID NO: 38373 - RNA, 20 nt, Artificial Sequence
  HTT spacer sequence TTCN PAM
cucuuuucuucucaggauuu

SEQ ID NO: 38374 - RNA, 20 nt, Artificial Sequence
  HTT spacer sequence TTCN PAM
ucucaggauuuaaaauuuaa

SEQ ID NO: 38375 - RNA, 20 nt, Artificial Sequence
  HTT spacer sequence TTCN PAM
caggauuuaaaauuuaauua

SEQ ID NO: 38376 - RNA, 20 nt, Artificial Sequence
  HTT spacer sequence TTCN PAM
augcccguguaaaguaugug

SEQ ID NO: 38377 - RNA, 20 nt, Artificial Sequence
  HTT spacer sequence TTCN PAM
cauacuuuacacgggcauag

SEQ ID NO: 38378 - RNA, 20 nt, Artificial Sequence
  HTT spacer sequence TTCN PAM
guuguacauguuccuguuua

SEQ ID NO: 38379 - RNA, 20 nt, Artificial Sequence
  HTT spacer sequence TTCN PAM
uguuuaugcauucacaaggu

SEQ ID NO: 38380 - RNA, 20 nt, Artificial Sequence
  HTT spacer sequence TTCN PAM
caaggugacugggauguaga

SEQ ID NO: 38381 - RNA, 20 nt, Artificial Sequence
  HTT spacer sequence TTCN PAM
ccacccaccagucagggaca

SEQ ID NO: 38382 - RNA, 20 nt, Artificial Sequence
  HTT spacer sequence TTCN PAM
cagcugagugacagggaggc

SEQ ID NO: 38383 - RNA, 20 nt, Artificial Sequence
  HTT spacer sequence TTCN PAM
uugcuagcccugggguggcg

SEQ ID NO: 38384 - RNA, 20 nt, Artificial Sequence
  HTT spacer sequence TTCN PAM
gcccccguuccagcugacau

SEQ ID NO: 38385 - RNA, 20 nt, Artificial Sequence
  HTT spacer sequence TTCN PAM
agcugacaucuugcacggug

SEQ ID NO: 38386 - RNA, 20 nt, Artificial Sequence
  HTT spacer sequence TTCN PAM
auuuuaaugacuuggcuccu

SEQ ID NO: 38387 - RNA, 20 nt, Artificial Sequence
  HTT spacer sequence TTCN PAM
ggauggccgggcugcugcug

SEQ ID NO: 38388 - RNA, 20 nt, Artificial Sequence
  HTT spacer sequence TTCN PAM
ucagcccuagaggcgagcca

SEQ ID NO: 38389 - RNA, 20 nt, Artificial Sequence
  HTT spacer sequence TTCN PAM
auacccaaaacaucgacggg

SEQ ID NO: 38390 - RNA, 20 nt, Artificial Sequence
  HTT spacer sequence TTCN PAM
uccacuuaccacauucaaua

SEQ ID NO: 38391 - RNA, 20 nt, Artificial Sequence
  HTT spacer sequence TTCN PAM
aacauuuccuccacuuacca

SEQ ID NO: 38392 - RNA, 20 nt, Artificial Sequence
  HTT spacer sequence TTCN PAM
accugucccucuccuaugug

SEQ ID NO: 38393 - RNA, 20 nt, Artificial Sequence
  HTT spacer sequence TTCN PAM
gcucccccucacguaugugg

SEQ ID NO: 38394 - RNA, 20 nt, Artificial Sequence
  HTT spacer sequence TTCN PAM
caccagcucccaacagaggc

SEQ ID NO: 38395 - RNA, 20 nt, Artificial Sequence
  HTT spacer sequence TTCN PAM
accgcuccugcugccccgcc

SEQ ID NO: 38396 - RNA, 20 nt, Artificial Sequence
  HTT spacer sequence TTCN PAM
cuuaagggccuccucaaaca

SEQ ID NO: 38397 - RNA, 20 nt, Artificial Sequence
  HTT spacer sequence TTCN PAM
guagcuucccuuaagggccu

SEQ ID NO: 38398 - RNA, 20 nt, Artificial Sequence
  HTT spacer sequence TTCN PAM
uacguguuauaauucaguag

SEQ ID NO: 38399 - RNA, 20 nt, Artificial Sequence
  HTT spacer sequence TTCN PAM
guauugguugggggcuccug

SEQ ID NO: 38400 - RNA, 20 nt, Artificial Sequence
  HTT spacer sequence TTCN PAM
cauccuagcuuuuuccugga

SEQ ID NO: 38401 - RNA, 20 nt, Artificial Sequence
  HTT spacer sequence TTCN PAM
uggaaagcccgcuagaaggu

SEQ ID NO: 38402 - RNA, 20 nt, Artificial Sequence
  HTT spacer sequence TTCN PAM
aggaaaaagcuaggaugaga

SEQ ID NO: 38403 - RNA, 20 nt, Artificial Sequence
  HTT spacer sequence TTCN PAM
agcgggcuuuccaggaaaaa

SEQ ID NO: 38404 - RNA, 20 nt, Artificial Sequence
  HTT spacer sequence TTCN PAM
caaaccuucuagcgggcuuu

SEQ ID NO: 38405 - RNA, 20 nt, Artificial Sequence
  HTT spacer sequence TTCN PAM
ccucguucccaaaccuucua

SEQ ID NO: 38406 - RNA, 20 nt, Artificial Sequence
  HTT spacer sequence TTCN PAM
cagaacuguuggcugcuccc

SEQ ID NO: 38407 - RNA, 20 nt, Artificial Sequence
  HTT spacer sequence TTCN PAM
gagaacuuuccccucguucc

SEQ ID NO: 38408 - RNA, 20 nt, Artificial Sequence
  HTT spacer sequence TTCN PAM
uggcuagauguuuacauuug

SEQ ID NO: 38409 - RNA, 20 nt, Artificial Sequence
  HTT spacer sequence TTCN PAM
uacaaauguaaacaucuagc

SEQ ID NO: 38410 - RNA, 20 nt, Artificial Sequence
  HTT spacer sequence TTCN PAM
caguguuauuucuuacaaau

SEQ ID NO: 38411 - RNA, 20 nt, Artificial Sequence
  HTT spacer sequence TTCN PAM
cuuggaaugcauaucgcugg

SEQ ID NO: 38412 - RNA, 20 nt, Artificial Sequence
  HTT spacer sequence TTCN PAM
aagggaauggcucuguuuua

SEQ ID NO: 38413 - RNA, 20 nt, Artificial Sequence
  HTT spacer sequence TTCN PAM
ucuuguuuacgacgugaucu

SEQ ID NO: 38414 - RNA, 20 nt, Artificial Sequence
  HTT spacer sequence TTCN PAM
gagccccuugcuaaggacug

SEQ ID NO: 38415 - RNA, 20 nt, Artificial Sequence
  HTT spacer sequence TTCN PAM
ucuccggagcacacaggcag

SEQ ID NO: 38416 - RNA, 20 nt, Artificial Sequence
  HTT spacer sequence TTCN PAM
cccacgcauauacauaaagu

SEQ ID NO: 38417 - RNA, 20 nt, Artificial Sequence
  HTT spacer sequence TTCN PAM
uccuggaaguugacuuuccu

SEQ ID NO: 38418 - RNA, 20 nt, Artificial Sequence
  HTT spacer sequence TTCN PAM
uggaaguugacuuuccuuag

SEQ ID NO: 38419 - RNA, 20 nt, Artificial Sequence
  HTT spacer sequence TTCN PAM
aggaagaaccgacacgggca

SEQ ID NO: 38420 - RNA, 20 nt, Artificial Sequence
  HTT spacer sequence TTCN PAM
uuagacccgccaggucaagu

SEQ ID NO: 38421 - RNA, 20 nt, Artificial Sequence
  HTT spacer sequence TTCN PAM
uugcccacuaggaucccacu

SEQ ID NO: 38422 - RNA, 20 nt, Artificial Sequence
  HTT spacer sequence TTCN PAM
ccagugggauccuagugggc

SEQ ID NO: 38423 - RNA, 20 nt, Artificial Sequence
  HTT spacer sequence TTCN PAM
gcagagagcugauauggaga

SEQ ID NO: 38424 - RNA, 20 nt, Artificial Sequence
  HTT spacer sequence TTCN PAM
ucccuucugcagagagcuga

SEQ ID NO: 38425 - RNA, 20 nt, Artificial Sequence
  HTT spacer sequence TTCN PAM
uaaaaaucuguggcaagcac

SEQ ID NO: 38426 - RNA, 20 nt, Artificial Sequence
  HTT spacer sequence TTCN PAM
ugcugguaauaucgggaaag

SEQ ID NO: 38427 - RNA, 20 nt, Artificial Sequence
  HTT spacer sequence TTCN PAM
cgauauuaccagcaggaaaa

SEQ ID NO: 38428 - RNA, 20 nt, Artificial Sequence
  HTT spacer sequence TTCN PAM
uuaaaaucuuucccgauauu

SEQ ID NO: 38429 - RNA, 20 nt, Artificial Sequence
  HTT spacer sequence TTCN PAM
acccugguuucauuaaaauc

SEQ ID NO: 38430 - RNA, 20 nt, Artificial Sequence
  HTT spacer sequence TTCN PAM
gugcauugccaaacaauucu

SEQ ID NO: 38431 - RNA, 20 nt, Artificial Sequence
  HTT spacer sequence TTCN PAM
uucccaaaaugugccucccu

SEQ ID NO: 38432 - RNA, 20 nt, Artificial Sequence
  HTT spacer sequence TTCN PAM
caaaaugugccucccuuccg

SEQ ID NO: 38433 - RNA, 20 nt, Artificial Sequence
  HTT spacer sequence TTCN PAM
gcugcgggcccagcugaguc

SEQ ID NO: 38434 - RNA, 20 nt, Artificial Sequence
  HTT spacer sequence TTCN PAM
agcugccaagugcucuuugu

SEQ ID NO: 38435 - RNA, 20 nt, Artificial Sequence
  HTT spacer sequence TTCN PAM
gccagcgcauguguccuuuc

SEQ ID NO: 38436 - RNA, 20 nt, Artificial Sequence
  HTT spacer sequence TTCN PAM
aggggaaaaugugaagcuga

SEQ ID NO: 38437 - RNA, 20 nt, Artificial Sequence
  HTT spacer sequence TTCN PAM
ccuugaaaggacacaugcgc

SEQ ID NO: 38438 - RNA, 20 nt, Artificial Sequence
  HTT spacer sequence TTCN PAM
cauuuuccccuugaaaggac

SEQ ID NO: 38439 - RNA, 20 nt, Artificial Sequence
  HTT spacer sequence TTCN PAM
gcuucacauuuuccccuuga

SEQ ID NO: 38440 - RNA, 20 nt, Artificial Sequence
  HTT spacer sequence TTCN PAM
gggugucuggaggggguuca

SEQ ID NO: 38441 - RNA, 20 nt, Artificial Sequence
  HTT spacer sequence TTCN PAM
cagaugcuacauucugggug

SEQ ID NO: 38442 - RNA, 20 nt, Artificial Sequence
  HTT spacer sequence TTCN PAM
uggagggggucauuucagag

SEQ ID NO: 38443 - RNA, 20 nt, Artificial Sequence
  HTT spacer sequence TTCN PAM
gagcccucggagccaaugaa

SEQ ID NO: 38444 - RNA, 20 nt, Artificial Sequence
  HTT spacer sequence TTCN PAM
uuggcuccgagggcucugaa

SEQ ID NO: 38445 - RNA, 20 nt, Artificial Sequence
  HTT spacer sequence TTCN PAM
accugccaggcggccacaca

SEQ ID NO: 38446 - RNA, 20 nt, Artificial Sequence
  HTT spacer sequence TTCN PAM
ucccguugcgggguggagug

SEQ ID NO: 38447 - RNA, 20 nt, Artificial Sequence
  HTT spacer sequence TTCN PAM
gugugucugguggguggagu

SEQ ID NO: 38448 - RNA, 20 nt, Artificial Sequence
  HTT spacer sequence TTCN PAM
cuugcuaccugugagcaucc

SEQ ID NO: 38449 - RNA, 20 nt, Artificial Sequence
  HTT spacer sequence TTCN PAM
cagcagacauccucaucggg

SEQ ID NO: 38450 - RNA, 20 nt, Artificial Sequence
  HTT spacer sequence TTCN PAM
ucccucugcggggaggaccc

SEQ ID NO: 38451 - RNA, 20 nt, Artificial Sequence
  HTT spacer sequence TTCN PAM
cacuccuacacgugaccccu

SEQ ID NO: 38452 - RNA, 20 nt, Artificial Sequence
  HTT spacer sequence TTCN PAM
ucucacuccuacacgugacc

SEQ ID NO: 38453 - RNA, 20 nt, Artificial Sequence
  HTT spacer sequence TTCN PAM
uucuucucacuccuacacgu

SEQ ID NO: 38454 - RNA, 20 nt, Artificial Sequence
  HTT spacer sequence TTCN PAM
caggaggcccaggcccggca

SEQ ID NO: 38455 - RNA, 20 nt, Artificial Sequence
  HTT spacer sequence TTCN PAM
gagcagcucccuccuuccca

SEQ ID NO: 38456 - RNA, 20 nt, Artificial Sequence
  HTT spacer sequence TTCN PAM
guugucaugcggcauucuga

SEQ ID NO: 38457 - RNA, 20 nt, Artificial Sequence
  HTT spacer sequence TTCN PAM
agguugccuucaguugucau

SEQ ID NO: 38458 - RNA, 20 nt, Artificial Sequence
  HTT spacer sequence TTCN PAM
ggggccgcucuucccccaug

SEQ ID NO: 38459 - RNA, 20 nt, Artificial Sequence
  HTT spacer sequence TTCN PAM
cccaugugccugucacgcuc

SEQ ID NO: 38460 - RNA, 20 nt, Artificial Sequence
  HTT spacer sequence TTCN PAM
uuugacugcaccagagcgug

SEQ ID NO: 38461 - RNA, 20 nt, Artificial Sequence
  HTT spacer sequence TTCN PAM
ccucaguuguuucuaagagc

SEQ ID NO: 38462 - RNA, 20 nt, Artificial Sequence
  HTT spacer sequence TTCN PAM
aagagcagagucucccgcug

SEQ ID NO: 38463 - RNA, 20 nt, Artificial Sequence
  HTT spacer sequence TTCN PAM
ggucuggguggggcuccggg

SEQ ID NO: 38464 - RNA, 20 nt, Artificial Sequence
  HTT spacer sequence TTCN PAM
gagagcaaagggaaggacug

SEQ ID NO: 38465 - RNA, 20 nt, Artificial Sequence
  HTT spacer sequence TTCN PAM
cuuugcucucagaagcauuc

SEQ ID NO: 38466 - RNA, 20 nt, Artificial Sequence
  HTT spacer sequence TTCN PAM
uuuaauuuggauguacaaug

SEQ ID NO: 38467 - RNA, 20 nt, Artificial Sequence
  HTT spacer sequence TTCN PAM
auuuuuuuccuuuaauuugg

SEQ ID NO: 38468 - RNA, 20 nt, Artificial Sequence
  HTT spacer sequence TTCN PAM
ugagaaccuagaccuugcug

SEQ ID NO: 38469 - RNA, 20 nt, Artificial Sequence
  HTT spacer sequence TTCN PAM
caugaagcaaagcaagccuc

SEQ ID NO: 38470 - RNA, 20 nt, Artificial Sequence
  HTT spacer sequence TTCN PAM
uaagacuccagcucagcaag

SEQ ID NO: 38471 - RNA, 20 nt, Artificial Sequence
  HTT spacer sequence TTCN PAM
ccagcaggggcagaaacugu

SEQ ID NO: 38472 - RNA, 20 nt, Artificial Sequence
  HTT spacer sequence TTCN PAM
gccccugcuggagaagcacu

SEQ ID NO: 38473 - RNA, 20 nt, Artificial Sequence
  HTT spacer sequence TTCN PAM
guagccagggaugaggaagu

SEQ ID NO: 38474 - RNA, 20 nt, Artificial Sequence
  HTT spacer sequence TTCN PAM
ucaucccuggcuacagaaaa

SEQ ID NO: 38475 - RNA, 20 nt, Artificial Sequence
  HTT spacer sequence TTCN PAM
gcaagggccuucccaaacca

SEQ ID NO: 38476 - RNA, 20 nt, Artificial Sequence
  HTT spacer sequence TTCN PAM
caaaccacaguacagguggu

SEQ ID NO: 38477 - RNA, 20 nt, Artificial Sequence
  HTT spacer sequence TTCN PAM
ugcccugcagaugggagcug

SEQ ID NO: 38478 - RNA, 20 nt, Artificial Sequence
  HTT spacer sequence TTCN PAM
uggucaagugacaucauaag

SEQ ID NO: 38479 - RNA, 20 nt, Artificial Sequence
  HTT spacer sequence TTCN PAM
gugccaugggccaaguccug

SEQ ID NO: 38480 - RNA, 20 nt, Artificial Sequence
  HTT spacer sequence TTCN PAM
cacagggcccaccacccuuc

SEQ ID NO: 38481 - RNA, 20 nt, Artificial Sequence
  HTT spacer sequence TTCN PAM
accuccuuggccauugacac

SEQ ID NO: 38482 - RNA, 20 nt, Artificial Sequence
  HTT spacer sequence TTCN PAM
agcuuguuuguccugucuga

SEQ ID NO: 38483 - RNA, 20 nt, Artificial Sequence
  HTT spacer sequence TTCN PAM
gacaggacaaacaagcuaga

SEQ ID NO: 38484 - RNA, 20 nt, Artificial Sequence
  HTT spacer sequence TTCN PAM
uggaguaggcgcugguucag

SEQ ID NO: 38485 - RNA, 20 nt, Artificial Sequence
  HTT spacer sequence TTCN PAM
aagcuccggacgagccucuc

SEQ ID NO: 38486 - RNA, 20 nt, Artificial Sequence
  HTT spacer sequence TTCN PAM
gagaggcucguccggagcuu

SEQ ID NO: 38487 - RNA, 20 nt, Artificial Sequence
  HTT spacer sequence TTCN PAM
ugcagguugguaagacaucu

SEQ ID NO: 38488 - RNA, 20 nt, Artificial Sequence
  HTT spacer sequence TTCN PAM
ucuggugcaggguauuuagu

SEQ ID NO: 38489 - RNA, 20 nt, Artificial Sequence
  HTT spacer sequence TTCN PAM
ggcuaauuggcaggggucgu

SEQ ID NO: 38490 - RNA, 20 nt, Artificial Sequence
  HTT spacer sequence TTCN PAM
uucccugcucugcugucugu

SEQ ID NO: 38491 - RNA, 20 nt, Artificial Sequence
  HTT spacer sequence TTCN PAM
cugcucugcugucugugcca

SEQ ID NO: 38492 - RNA, 20 nt, Artificial Sequence
  HTT spacer sequence TTCN PAM
cugagcagggauagggauca

SEQ ID NO: 38493 - RNA, 20 nt, Artificial Sequence
  HTT spacer sequence TTCN PAM
gagcuaccuaaauucugguc

SEQ ID NO: 38494 - RNA, 20 nt, Artificial Sequence
  HTT spacer sequence TTCN PAM
ggucacuucagagaaaugga

SEQ ID NO: 38495 - RNA, 20 nt, Artificial Sequence
  HTT spacer sequence TTCN PAM
gagaaauggagcacccccuu

SEQ ID NO: 38496 - RNA, 20 nt, Artificial Sequence
  HTT spacer sequence TTCN PAM
cugaagugaccagaauuuag

SEQ ID NO: 38497 - RNA, 20 nt, Artificial Sequence
  HTT spacer sequence TTCN PAM
cccugguccagguguggaca

SEQ ID NO: 38498 - RNA, 20 nt, Artificial Sequence
  HTT spacer sequence TTCN PAM
gaaagaagaggggccggggu

SEQ ID NO: 38499 - RNA, 20 nt, Artificial Sequence
  HTT spacer sequence TTCN PAM
gaaauuaccagccaugccag

SEQ ID NO: 38500 - RNA, 20 nt, Artificial Sequence
  HTT spacer sequence TTCN PAM
uucugaaauuaccagccaug

SEQ ID NO: 38501 - RNA, 20 nt, Artificial Sequence
  HTT spacer sequence TTCN PAM
cacuggaccccggccccucu

SEQ ID NO: 38502 - RNA, 20 nt, Artificial Sequence
  HTT spacer sequence TTCN PAM
ccgcugcuucccacuggacc

SEQ ID NO: 38503 - RNA, 20 nt, Artificial Sequence
  HTT spacer sequence TTCN PAM
ucuuccucaucggagagcac

SEQ ID NO: 38504 - RNA, 20 nt, Artificial Sequence
  HTT spacer sequence TTCN PAM
ucaucggagagcacacccug

SEQ ID NO: 38505 - RNA, 20 nt, Artificial Sequence
  HTT spacer sequence TTCN PAM
gugguauuugauuuuggcug

SEQ ID NO: 38506 - RNA, 20 nt, Artificial Sequence
  HTT spacer sequence TTCN PAM
agaucccaacaaagccagua

SEQ ID NO: 38507 - RNA, 20 nt, Artificial Sequence
  HTT spacer sequence TTCN PAM
ccugcguggugcguggagca

SEQ ID NO: 38508 - RNA, 20 nt, Artificial Sequence
  HTT spacer sequence TTCN PAM
cucaucugacuuacagugcu

SEQ ID NO: 38509 - RNA, 20 nt, Artificial Sequence
  HTT spacer sequence TTCN PAM
guggcggcuccacccgguac

SEQ ID NO: 38510 - RNA, 20 nt, Artificial Sequence
  HTT spacer sequence TTCN PAM
ucuguccucgguuggcugug

SEQ ID NO: 38511 - RNA, 20 nt, Artificial Sequence
  HTT spacer sequence TTCN PAM
uggggguguggggugcaccc

SEQ ID NO: 38512 - RNA, 20 nt, Artificial Sequence
  HTT spacer sequence TTCN PAM
cugaggggugcaccccacac

SEQ ID NO: 38513 - RNA, 20 nt, Artificial Sequence
  HTT spacer sequence TTCN PAM
ucaggccccacugcaggcuu

SEQ ID NO: 38514 - RNA, 20 nt, Artificial Sequence
  HTT spacer sequence TTCN PAM
caaaagagguccuggugaug

SEQ ID NO: 38515 - RNA, 20 nt, Artificial Sequence
  HTT spacer sequence TTCN PAM
ccacccuacaccaggccucc

SEQ ID NO: 38516 - RNA, 20 nt, Artificial Sequence
  HTT spacer sequence TTCN PAM
gcccucugccuccagugaug

SEQ ID NO: 38517 - RNA, 20 nt, Artificial Sequence
  HTT spacer sequence TTCN PAM
ccuugugugcacaggccccu

SEQ ID NO: 38518 - RNA, 20 nt, Artificial Sequence
  HTT spacer sequence TTCN PAM
acccugccccagcggcggca

SEQ ID NO: 38519 - RNA, 20 nt, Artificial Sequence
  HTT spacer sequence TTCN PAM
ccuccuggccccaauugcuc

SEQ ID NO: 38520 - RNA, 20 nt, Artificial Sequence
  HTT spacer sequence TTCN PAM
ccagagcaauuggggccagg

SEQ ID NO: 38521 - RNA, 20 nt, Artificial Sequence
  HTT spacer sequence TTCN PAM
cugccuucacccaagcccug

SEQ ID NO: 38522 - RNA, 20 nt, Artificial Sequence
  HTT spacer sequence TTCN PAM
cccaagcccugaacuccuca

SEQ ID NO: 38523 - RNA, 20 nt, Artificial Sequence
  HTT spacer sequence TTCN PAM
gggcuugggugaaggcagag

SEQ ID NO: 38524 - RNA, 20 nt, Artificial Sequence
  HTT spacer sequence TTCN PAM
aggagcagcaguggugagca

SEQ ID NO: 38525 - RNA, 20 nt, Artificial Sequence
  HTT spacer sequence TTCN PAM
guguuugggagcccugcugc

SEQ ID NO: 38526 - RNA, 20 nt, Artificial Sequence
  HTT spacer sequence TTCN PAM
gcccugccugacaggccagc

SEQ ID NO: 38527 - RNA, 20 nt, Artificial Sequence
  HTT spacer sequence TTCN PAM
ggguggauuuucugcccugc

SEQ ID NO: 38528 - RNA, 20 nt, Artificial Sequence
  HTT spacer sequence TTCN PAM
aaauaaugaggcugggccca

SEQ ID NO: 38529 - RNA, 20 nt, Artificial Sequence
  HTT spacer sequence TTCN PAM
agccugagcccagcagggcc

SEQ ID NO: 38530 - RNA, 20 nt, Artificial Sequence
  HTT spacer sequence TTCN PAM
cccucaggugcugcugguug

SEQ ID NO: 38531 - RNA, 20 nt, Artificial Sequence
  HTT spacer sequence TTCN PAM
uguccucacauuggagguca

SEQ ID NO: 38532 - RNA, 20 nt, Artificial Sequence
  HTT spacer sequence TTCN PAM
cgaggcagagcccucacacu

SEQ ID NO: 38533 - RNA, 20 nt, Artificial Sequence
  HTT spacer sequence TTCN PAM
caggcucagugcacauggga

SEQ ID NO: 38534 - RNA, 20 nt, Artificial Sequence
  HTT spacer sequence TTCN PAM
caggguaaaaggcucaacuc

SEQ ID NO: 38535 - RNA, 20 nt, Artificial Sequence
  HTT spacer sequence TTCN PAM
agugggcgcagggaggcagg

SEQ ID NO: 38536 - RNA, 20 nt, Artificial Sequence
  HTT spacer sequence TTCN PAM
gccaggacaguaggccugac

SEQ ID NO: 38537 - RNA, 20 nt, Artificial Sequence
  HTT spacer sequence TTCN PAM
acaaauccaccuuggagcug

SEQ ID NO: 38538 - RNA, 20 nt, Artificial Sequence
  HTT spacer sequence TTCN PAM
gggagggcugugcccccuua

SEQ ID NO: 38539 - RNA, 20 nt, Artificial Sequence
  HTT spacer sequence TTCN PAM
ucaccuccacaacaggggua

SEQ ID NO: 38540 - RNA, 20 nt, Artificial Sequence
  HTT spacer sequence TTCN PAM
gggugcagcucuagcgacuc

SEQ ID NO: 38541 - RNA, 20 nt, Artificial Sequence
  HTT spacer sequence TTCN PAM
gcuuaccccuugugccggga

SEQ ID NO: 38542 - RNA, 20 nt, Artificial Sequence
  HTT spacer sequence TTCN PAM
guagccaugacuccaagggc

SEQ ID NO: 38543 - RNA, 20 nt, Artificial Sequence
  HTT spacer sequence TTCN PAM
gaccggucccugaccucacc

SEQ ID NO: 38544 - RNA, 20 nt, Artificial Sequence
  HTT spacer sequence TTCN PAM
gcccuccccggugaggucag

SEQ ID NO: 38545 - RNA, 20 nt, Artificial Sequence
  HTT spacer sequence TTCN PAM
ugaggagccagggcuuccua

SEQ ID NO: 38546 - RNA, 20 nt, Artificial Sequence
  HTT spacer sequence TTCN PAM
uagaggagguaggccuucua

SEQ ID NO: 38547 - RNA, 20 nt, Artificial Sequence
  HTT spacer sequence TTCN PAM
agucacuccuucaucugcag

SEQ ID NO: 38548 - RNA, 20 nt, Artificial Sequence
  HTT spacer sequence TTCN PAM
ucugcaggcacuccacagag

SEQ ID NO: 38549 - RNA, 20 nt, Artificial Sequence
  HTT spacer sequence TTCN PAM
aucugggccucaggagacau

SEQ ID NO: 38550 - RNA, 20 nt, Artificial Sequence
  HTT spacer sequence TTCN PAM
ucacacaucccuggggcccu

SEQ ID NO: 38551 - RNA, 20 nt, Artificial Sequence
  HTT spacer sequence TTCN PAM
uauccugacugcgggcaaga

SEQ ID NO: 38552 - RNA, 20 nt, Artificial Sequence
  HTT spacer sequence TTCN PAM
ccuucccuaugcugggcacc

SEQ ID NO: 38553 - RNA, 20 nt, Artificial Sequence
  HTT spacer sequence TTCN PAM
cuaugcugggcacccacagu

SEQ ID NO: 38554 - RNA, 20 nt, Artificial Sequence
  HTT spacer sequence TTCN PAM
ccugagagccucggucccac

SEQ ID NO: 38555 - RNA, 20 nt, Artificial Sequence
  HTT spacer sequence TTCN PAM
aggcucagcugcccuucuug

SEQ ID NO: 38556 - RNA, 20 nt, Artificial Sequence
  HTT spacer sequence TTCN PAM
uggggcagcccacaccugag

SEQ ID NO: 38557 - RNA, 20 nt, Artificial Sequence
  HTT spacer sequence TTCN PAM
ggugccgaugcccuugggcg

SEQ ID NO: 38558 - RNA, 20 nt, Artificial Sequence
  HTT spacer sequence TTCN PAM
ccgggcagaacccccaggcc

SEQ ID NO: 38559 - RNA, 20 nt, Artificial Sequence
  HTT spacer sequence TTCN PAM
gcccggagaagugccgccca

SEQ ID NO: 38560 - RNA, 20 nt, Artificial Sequence
  HTT spacer sequence TTCN PAM
gguuccgcugcaucuggggc

SEQ ID NO: 38561 - RNA, 20 nt, Artificial Sequence
  HTT spacer sequence TTCN PAM
gcugcaucuggggcucucgg

SEQ ID NO: 38562 - RNA, 20 nt, Artificial Sequence
  HTT spacer sequence TTCN PAM
gcacagcgugcggagacggg

SEQ ID NO: 38563 - RNA, 20 nt, Artificial Sequence
  HTT spacer sequence TTCN PAM
caggagugcccuguggccuc

SEQ ID NO: 38564 - RNA, 20 nt, Artificial Sequence
  HTT spacer sequence TTCN PAM
cuccugugucucaaacagag

SEQ ID NO: 38565 - RNA, 20 nt, Artificial Sequence
  HTT spacer sequence TTCN PAM
aguguccacagaccuaaggc

SEQ ID NO: 38566 - RNA, 20 nt, Artificial Sequence
  HTT spacer sequence TTCN PAM
cuugcuccagcccccaggcg

SEQ ID NO: 38567 - RNA, 20 nt, Artificial Sequence
  HTT spacer sequence TTCN PAM
ugugagggcccagccccagg

SEQ ID NO: 38568 - RNA, 20 nt, Artificial Sequence
  HTT spacer sequence TTCN PAM
gaaggcaggggccuucugag

SEQ ID NO: 38569 - RNA, 20 nt, Artificial Sequence
  HTT spacer sequence TTCN PAM
gaacuggggcugggcccugg

SEQ ID NO: 38570 - RNA, 20 nt, Artificial Sequence
  HTT spacer sequence TTCN PAM
gagggagcuuaaggguccca

SEQ ID NO: 38571 - RNA, 20 nt, Artificial Sequence
  HTT spacer sequence TTCN PAM
cccaccuuuugcccccuuuc

SEQ ID NO: 38572 - RNA, 20 nt, Artificial Sequence
  HTT spacer sequence TTCN PAM
ccuugccuguucccacccga

SEQ ID NO: 38573 - RNA, 20 nt, Artificial Sequence
  HTT spacer sequence TTCN PAM
cacccgaggcccccucuugg

SEQ ID NO: 38574 - RNA, 20 nt, Artificial Sequence
  HTT spacer sequence TTCN PAM
gugccgccccggcucacgca

SEQ ID NO: 38575 - RNA, 20 nt, Artificial Sequence
  HTT spacer sequence TTCN PAM
ugugcuuucaguuaaaaggu

SEQ ID NO: 38576 - RNA, 20 nt, Artificial Sequence
  HTT spacer sequence TTCN PAM
guuaaaagguuucuguuguu

SEQ ID NO: 38577 - RNA, 20 nt, Artificial Sequence
  HTT spacer sequence TTCN PAM
guuguuguagcuuaugcagu

SEQ ID NO: 38578 - RNA, 20 nt, Artificial Sequence
  HTT spacer sequence TTCN PAM
auagcaacagagcaacugca

SEQ ID NO: 38579 - RNA, 20 nt, Artificial Sequence
  HTT spacer sequence TTCN PAM
cguuuaaaagcuuuuaacua

SEQ ID NO: 38580 - RNA, 20 nt, Artificial Sequence
  HTT spacer sequence TTCN PAM
ugccugucagauguaggccc

SEQ ID NO: 38581 - RNA, 20 nt, Artificial Sequence
  HTT spacer sequence TTCN PAM
agcgagcgugagcggcgccu

SEQ ID NO: 38582 - RNA, 20 nt, Artificial Sequence
  HTT spacer sequence TTCN PAM
ccgccuggggagacacgagg

SEQ ID NO: 38583 - RNA, 20 nt, Artificial Sequence
  HTT spacer sequence TTCN PAM
ucgacgagcucaagcagacc

SEQ ID NO: 38584 - RNA, 20 nt, Artificial Sequence
  HTT spacer sequence TTCN PAM
acgagcucaagcagaccaag

SEQ ID NO: 38585 - RNA, 20 nt, Artificial Sequence
  HTT spacer sequence TTCN PAM
cguacaccuuggcguugcgc

SEQ ID NO: 38586 - RNA, 20 nt, Artificial Sequence
  HTT spacer sequence TTCN PAM
agaugaccggcgagcgcagg

SEQ ID NO: 38587 - RNA, 20 nt, Artificial Sequence
  HTT spacer sequence TTCN PAM
aguacaggugggcgagcggg

SEQ ID NO: 38588 - RNA, 20 nt, Artificial Sequence
  HTT spacer sequence TTCN PAM
uggagcucugagucgggacg

SEQ ID NO: 38589 - RNA, 20 nt, Artificial Sequence
  HTT spacer sequence TTCN PAM
gcccauacccggccagagga

SEQ ID NO: 38590 - RNA, 20 nt, Artificial Sequence
  HTT spacer sequence TTCN PAM
gugggccccgucucaccccg

SEQ ID NO: 38591 - RNA, 20 nt, Artificial Sequence
  HTT spacer sequence TTCN PAM
auuggggaaguggggaaacu

SEQ ID NO: 38592 - RNA, 20 nt, Artificial Sequence
  HTT spacer sequence TTCN PAM
ccaauggaaggcugcacaca

SEQ ID NO: 38593 - RNA, 20 nt, Artificial Sequence
  HTT spacer sequence TTCN PAM
ccacuuccccaauggaaggc

SEQ ID NO: 38594 - RNA, 20 nt, Artificial Sequence
  HTT spacer sequence TTCN PAM
ugcccuugcugggccucagu

SEQ ID NO: 38595 - RNA, 20 nt, Artificial Sequence
  HTT spacer sequence TTCN PAM
ggggccuacugcgucauugg

SEQ ID NO: 38596 - RNA, 20 nt, Artificial Sequence
  HTT spacer sequence TTCN PAM
ccaaugacgcaguaggcccc

SEQ ID NO: 38597 - RNA, 20 nt, Artificial Sequence
  HTT spacer sequence TTCN PAM
cacuugcagucucaauuucc

SEQ ID NO: 38598 - RNA, 20 nt, Artificial Sequence
  HTT spacer sequence TTCN PAM
agaaaucaccaggugaggug

SEQ ID NO: 38599 - RNA, 20 nt, Artificial Sequence
  HTT spacer sequence TTCN PAM
ggaaauaccccaccgugacc

SEQ ID NO: 38600 - RNA, 20 nt, Artificial Sequence
  HTT spacer sequence TTCN PAM
caccguaagccccacccaug

SEQ ID NO: 38601 - RNA, 20 nt, Artificial Sequence
  HTT spacer sequence TTCN PAM
ucgcaccguaagccccaccc

SEQ ID NO: 38602 - RNA, 20 nt, Artificial Sequence
  HTT spacer sequence TTCN PAM
ucuucgcaccguaagcccca

SEQ ID NO: 38603 - RNA, 20 nt, Artificial Sequence
  HTT spacer sequence TTCN PAM
ugcccuggcaaccugcaggg

SEQ ID NO: 38604 - RNA, 20 nt, Artificial Sequence
  HTT spacer sequence TTCN PAM
cugcagguugccagggcagg

SEQ ID NO: 38605 - RNA, 20 nt, Artificial Sequence
  HTT spacer sequence TTCN PAM
ccccaccaugaccccugccc

SEQ ID NO: 38606 - RNA, 20 nt, Artificial Sequence
  HTT spacer sequence TTCN PAM
cacccugcaagacccucacc

SEQ ID NO: 38607 - RNA, 20 nt, Artificial Sequence
  HTT spacer sequence TTCN PAM
ccgcacaccuaugaccuuca

SEQ ID NO: 38608 - RNA, 20 nt, Artificial Sequence
  HTT spacer sequence TTCN PAM
agcucuugcugccacccucg

SEQ ID NO: 38609 - RNA, 20 nt, Artificial Sequence
  HTT spacer sequence TTCN PAM
cccccugcagcuuccagcuc

SEQ ID NO: 38610 - RNA, 20 nt, Artificial Sequence
  HTT spacer sequence TTCN PAM
aggaugggaguggccucacu

SEQ ID NO: 38611 - RNA, 20 nt, Artificial Sequence
  HTT spacer sequence TTCN PAM
gcugugcuggaggccggcuc

SEQ ID NO: 38612 - RNA, 20 nt, Artificial Sequence
  HTT spacer sequence TTCN PAM
cuucugcugugcuggaggcc

SEQ ID NO: 38613 - RNA, 20 nt, Artificial Sequence
  HTT spacer sequence TTCN PAM
ccacucccacuagggcuggg

SEQ ID NO: 38614 - RNA, 20 nt, Artificial Sequence
  HTT spacer sequence TTCN PAM
guugcguugauuugauuuuu

SEQ ID NO: 38615 - RNA, 20 nt, Artificial Sequence
  HTT spacer sequence TTCN PAM
gagccuugaaggaggggucc

SEQ ID NO: 38616 - RNA, 20 nt, Artificial Sequence
  HTT spacer sequence TTCN PAM
aggcucagaaaaaaucaaau

SEQ ID NO: 38617 - RNA, 20 nt, Artificial Sequence
  HTT spacer sequence TTCN PAM
gagguucgguggacacaggc

SEQ ID NO: 38618 - RNA, 20 nt, Artificial Sequence
  HTT spacer sequence TTCN PAM
guggacacaggcagcugccc

SEQ ID NO: 38619 - RNA, 20 nt, Artificial Sequence
  HTT spacer sequence TTCN PAM
cguggccuccuaguccugcu

SEQ ID NO: 38620 - RNA, 20 nt, Artificial Sequence
  HTT spacer sequence TTCN PAM
ucaccaggugccugagcagg

SEQ ID NO: 38621 - RNA, 20 nt, Artificial Sequence
  HTT spacer sequence TTCN PAM
agcaggcuccccucugacuc

SEQ ID NO: 38622 - RNA, 20 nt, Artificial Sequence
  HTT spacer sequence TTCN PAM
ugagucagaggggagccugc

SEQ ID NO: 38623 - RNA, 20 nt, Artificial Sequence
  HTT spacer sequence TTCN PAM
cgggcaccaccucccuggcu

SEQ ID NO: 38624 - RNA, 20 nt, Artificial Sequence
  HTT spacer sequence TTCN PAM
uuauuuaugcugaaagccuc

SEQ ID NO: 38625 - RNA, 20 nt, Artificial Sequence
  HTT spacer sequence TTCN PAM
gcauaaauaaugaauaaccu

SEQ ID NO: 38626 - RNA, 20 nt, Artificial Sequence
  HTT spacer sequence TTCN PAM
gagucccaggggaggguuuc

SEQ ID NO: 38627 - RNA, 20 nt, Artificial Sequence
  HTT spacer sequence TTCN PAM
gucuccauuccuggaggcug

SEQ ID NO: 38628 - RNA, 20 nt, Artificial Sequence
  HTT spacer sequence TTCN PAM
uggaggcugagagaugaggg

SEQ ID NO: 38629 - RNA, 20 nt, Artificial Sequence
  HTT spacer sequence TTCN PAM
ucagccaugacgugcagugc

SEQ ID NO: 38630 - RNA, 20 nt, Artificial Sequence
  HTT spacer sequence TTCN PAM
acaccgcagccccucagagc

SEQ ID NO: 38631 - RNA, 20 nt, Artificial Sequence
  HTT spacer sequence TTCN PAM
ccgagggggaagcugaggcc

SEQ ID NO: 38632 - RNA, 20 nt, Artificial Sequence
  HTT spacer sequence TTCN PAM
cccucggugaacuaaggcug

SEQ ID NO: 38633 - RNA, 20 nt, Artificial Sequence
  HTT spacer sequence TTCN PAM
ucugcuaaggacuauguggc

SEQ ID NO: 38634 - RNA, 20 nt, Artificial Sequence
  HTT spacer sequence TTCN PAM
uuauacccgcagucucccca

SEQ ID NO: 38635 - RNA, 20 nt, Artificial Sequence
  HTT spacer sequence TTCN PAM
uuuuuuuuucuuuuucuuuu

SEQ ID NO: 38636 - RNA, 20 nt, Artificial Sequence
  HTT spacer sequence TTCN PAM
uuuucuuuuuuuuuuuuuua

SEQ ID NO: 38637 - RNA, 20 nt, Artificial Sequence
  HTT spacer sequence TTCN PAM
uuuuuuuuuuuuuacaagaa

SEQ ID NO: 38638 - RNA, 20 nt, Artificial Sequence
  HTT spacer sequence TTCN PAM
uguaaaaaaaaaaaaaagaa

SEQ ID NO: 38639 - RNA, 20 nt, Artificial Sequence
  HTT spacer sequence TTCN PAM
gcccaacagccuuaauauau

SEQ ID NO: 38640 - RNA, 20 nt, Artificial Sequence
  HTT spacer sequence TTCN PAM
ucagcccaacagccuuaaua

SEQ ID NO: 38641 - RNA, 20 nt, Artificial Sequence
  HTT spacer sequence TTCN PAM
guggagcaugguuuguugaa

SEQ ID NO: 38642 - RNA, 20 nt, Artificial Sequence
  HTT spacer sequence TTCN PAM
acaaaccaugcuccacagaa

SEQ ID NO: 38643 - RNA, 20 nt, Artificial Sequence
  HTT spacer sequence TTCN PAM
caguguaggaggcccccaaa

SEQ ID NO: 38644 - RNA, 20 nt, Artificial Sequence
  HTT spacer sequence TTCN PAM
cguuucuccaaagagugggc

SEQ ID NO: 38645 - RNA, 20 nt, Artificial Sequence
  HTT spacer sequence TTCN PAM
ccaaagagugggcuggcuca

SEQ ID NO: 38646 - RNA, 20 nt, Artificial Sequence
  HTT spacer sequence TTCN PAM
cucucugcccuacuugagcc

SEQ ID NO: 38647 - RNA, 20 nt, Artificial Sequence
  HTT spacer sequence TTCN PAM
cagccacgugccacccuggg

SEQ ID NO: 38648 - RNA, 20 nt, Artificial Sequence
  HTT spacer sequence TTCN PAM
gaauccagcuuauuguuucc

SEQ ID NO: 38649 - RNA, 20 nt, Artificial Sequence
  HTT spacer sequence TTCN PAM
gaaugaggugcccccagcaa

SEQ ID NO: 38650 - RNA, 20 nt, Artificial Sequence
  HTT spacer sequence TTCN PAM
aacggccaauggccacaccc

SEQ ID NO: 38651 - RNA, 20 nt, Artificial Sequence
  HTT spacer sequence TTCN PAM
ucccuggccuggccagagcu

SEQ ID NO: 38652 - RNA, 20 nt, Artificial Sequence
  HTT spacer sequence TTCN PAM
cuggccuggccagagcuguc

SEQ ID NO: 38653 - RNA, 20 nt, Artificial Sequence
  HTT spacer sequence TTCN PAM
cacacugccugaugccucau

SEQ ID NO: 38654 - RNA, 20 nt, Artificial Sequence
  HTT spacer sequence TTCN PAM
accaagaauggcaugggagc

SEQ ID NO: 38655 - RNA, 20 nt, Artificial Sequence
  HTT spacer sequence TTCN PAM
ugguugaaccuacagucugg

SEQ ID NO: 38656 - RNA, 20 nt, Artificial Sequence
  HTT spacer sequence TTCN PAM
ccucucugagccucuauuuu

SEQ ID NO: 38657 - RNA, 20 nt, Artificial Sequence
  HTT spacer sequence TTCN PAM
uucaccucucugagccucua

SEQ ID NO: 38658 - RNA, 20 nt, Artificial Sequence
  HTT spacer sequence TTCN PAM
guguccacagcccugaguca

SEQ ID NO: 38659 - RNA, 20 nt, Artificial Sequence
  HTT spacer sequence TTCN PAM
cucccgaacaacacaguuau

SEQ ID NO: 38660 - RNA, 20 nt, Artificial Sequence
  HTT spacer sequence TTCN PAM
ggagagaaugccucagggag

SEQ ID NO: 38661 - RNA, 20 nt, Artificial Sequence
  HTT spacer sequence TTCN PAM
aaaugaauuauuuaaaaagc

SEQ ID NO: 38662 - RNA, 20 nt, Artificial Sequence
  HTT spacer sequence TTCN PAM
uuuugaaagguagaguaaua

SEQ ID NO: 38663 - RNA, 20 nt, Artificial Sequence
  HTT spacer sequence TTCN PAM
agacucucugcaaugagcaa

SEQ ID NO: 38664 - RNA, 20 nt, Artificial Sequence
  HTT spacer sequence TTCN PAM
auaguuucuagacucucugc

SEQ ID NO: 38665 - RNA, 20 nt, Artificial Sequence
  HTT spacer sequence TTCN PAM
cuugcuuuucuauaguuucu

SEQ ID NO: 38666 - RNA, 20 nt, Artificial Sequence
  HTT spacer sequence TTCN PAM
uuuuuaacaucugagcccgu

SEQ ID NO: 38667 - RNA, 20 nt, Artificial Sequence
  HTT spacer sequence TTCN PAM
ggaccuacacgggcucagau

SEQ ID NO: 38668 - RNA, 20 nt, Artificial Sequence
  HTT spacer sequence TTCN PAM
uucuaaguccauugucaucu

SEQ ID NO: 38669 - RNA, 20 nt, Artificial Sequence
  HTT spacer sequence TTCN PAM
aaguccauugucaucuugac

SEQ ID NO: 38670 - RNA, 20 nt, Artificial Sequence
  HTT spacer sequence TTCN PAM
cacccuuggcucuugugucu

SEQ ID NO: 38671 - RNA, 20 nt, Artificial Sequence
  HTT spacer sequence TTCN PAM
ggaaauuaaaaugcaugaca

SEQ ID NO: 38672 - RNA, 20 nt, Artificial Sequence
  HTT spacer sequence TTCN PAM
ugaaacgagagacacaagag

SEQ ID NO: 38673 - RNA, 20 nt, Artificial Sequence
  HTT spacer sequence TTCN PAM
ggccaagguccccgaguccu

SEQ ID NO: 38674 - RNA, 20 nt, Artificial Sequence
  HTT spacer sequence TTCN PAM
cguauaaccagugcuccuac

SEQ ID NO: 38675 - RNA, 20 nt, Artificial Sequence
  HTT spacer sequence TTCN PAM
uaggagcacugguuauacgg

SEQ ID NO: 38676 - RNA, 20 nt, Artificial Sequence
  HTT spacer sequence TTCN PAM
aggaugaucgcuccgacagc

SEQ ID NO: 38677 - RNA, 20 nt, Artificial Sequence
  HTT spacer sequence TTCN PAM
gguagugugucugcuugucc

SEQ ID NO: 38678 - RNA, 20 nt, Artificial Sequence
  HTT spacer sequence TTCN PAM
ccugcccugggguaucucag

SEQ ID NO: 38679 - RNA, 20 nt, Artificial Sequence
  HTT spacer sequence TTCN PAM
cuaaauggugggggcugaga

SEQ ID NO: 38680 - RNA, 20 nt, Artificial Sequence
  HTT spacer sequence TTCN PAM
gugcagcucaaaagugaugg

SEQ ID NO: 38681 - RNA, 20 nt, Artificial Sequence
  HTT spacer sequence TTCN PAM
uugacuucucuggccucagu

SEQ ID NO: 38682 - RNA, 20 nt, Artificial Sequence
  HTT spacer sequence TTCN PAM
cuggccucagucucccuccu

SEQ ID NO: 38683 - RNA, 20 nt, Artificial Sequence
  HTT spacer sequence TTCN PAM
cagaggguggcugggagcau

SEQ ID NO: 38684 - RNA, 20 nt, Artificial Sequence
  HTT spacer sequence TTCN PAM
cuccugugaugcucccagcc

SEQ ID NO: 38685 - RNA, 20 nt, Artificial Sequence
  HTT spacer sequence TTCN PAM
ggggucuggggcuuggucuc

SEQ ID NO: 38686 - RNA, 20 nt, Artificial Sequence
  HTT spacer sequence TTCN PAM
cugggcuccccaggcccacc

SEQ ID NO: 38687 - RNA, 20 nt, Artificial Sequence
  HTT spacer sequence TTCN PAM
agguaaaauagaaguuggcc

SEQ ID NO: 38688 - RNA, 20 nt, Artificial Sequence
  HTT spacer sequence TTCN PAM
auuuuaccuugaaagcccac

SEQ ID NO: 38689 - RNA, 20 nt, Artificial Sequence
  HTT spacer sequence TTCN PAM
ugccuccaaauggccaacuu

SEQ ID NO: 38690 - RNA, 20 nt, Artificial Sequence
  HTT spacer sequence TTCN PAM
uguucuugccuccaaauggc

SEQ ID NO: 38691 - RNA, 20 nt, Artificial Sequence
  HTT spacer sequence TTCN PAM
ccccugcccuggucuucaag

SEQ ID NO: 38692 - RNA, 20 nt, Artificial Sequence
  HTT spacer sequence TTCN PAM
agucuuucugacaggaggug

SEQ ID NO: 38693 - RNA, 20 nt, Artificial Sequence
  HTT spacer sequence TTCN PAM
gacaggaggugucagaaaag

SEQ ID NO: 38694 - RNA, 20 nt, Artificial Sequence
  HTT spacer sequence TTCN PAM
gacaccuccugucagaaaga

SEQ ID NO: 38695 - RNA, 20 nt, Artificial Sequence
  HTT spacer sequence TTCN PAM
cuacuaaagauacuuuucug

SEQ ID NO: 38696 - RNA, 20 nt, Artificial Sequence
  HTT spacer sequence TTCN PAM
cauugaagaccugagacaaa

SEQ ID NO: 38697 - RNA, 20 nt, Artificial Sequence
  HTT spacer sequence TTCN PAM
augagaaauccugagucaag

SEQ ID NO: 38698 - RNA, 20 nt, Artificial Sequence
  HTT spacer sequence TTCN PAM
agcugccagcaaaagcguuu

SEQ ID NO: 38699 - RNA, 20 nt, Artificial Sequence
  HTT spacer sequence TTCN PAM
uucuagcugccagcaaaagc

SEQ ID NO: 38700 - RNA, 20 nt, Artificial Sequence
  HTT spacer sequence TTCN PAM
cguggacugagcccaguucu

SEQ ID NO: 38701 - RNA, 20 nt, Artificial Sequence
  HTT spacer sequence TTCN PAM
cagacucagcugccuggggc

SEQ ID NO: 38702 - RNA, 20 nt, Artificial Sequence
  HTT spacer sequence TTCN PAM
gggaggucugcugagaccac

SEQ ID NO: 38703 - RNA, 20 nt, Artificial Sequence
  HTT spacer sequence TTCN PAM
gccucucuaccaaggugugc

SEQ ID NO: 38704 - RNA, 20 nt, Artificial Sequence
  HTT spacer sequence TTCN PAM
aggccgccgggagauaaggg

SEQ ID NO: 38705 - RNA, 20 nt, Artificial Sequence
  HTT spacer sequence TTCN PAM
uucugggaccucaguuuccc

SEQ ID NO: 38706 - RNA, 20 nt, Artificial Sequence
  HTT spacer sequence TTCN PAM
gggaccucaguuuccccauc

SEQ ID NO: 38707 - RNA, 20 nt, Artificial Sequence
  HTT spacer sequence TTCN PAM
ccaucugccuaaggccgggu

SEQ ID NO: 38708 - RNA, 20 nt, Artificial Sequence
  HTT spacer sequence TTCN PAM
cuacagggguccugaguacu

SEQ ID NO: 38709 - RNA, 20 nt, Artificial Sequence
  HTT spacer sequence TTCN PAM
ucucucccuggggguggucu

SEQ ID NO: 38710 - RNA, 20 nt, Artificial Sequence
  HTT spacer sequence TTCN PAM
cccaccaaacugggcaggug

SEQ ID NO: 38711 - RNA, 20 nt, Artificial Sequence
  HTT spacer sequence TTCN PAM
gggcugcagaggggcauauc

SEQ ID NO: 38712 - RNA, 20 nt, Artificial Sequence
  HTT spacer sequence TTCN PAM
agaccgaagggguguggauu

SEQ ID NO: 38713 - RNA, 20 nt, Artificial Sequence
  HTT spacer sequence TTCN PAM
gucuggaaagggugggaugu

SEQ ID NO: 38714 - RNA, 20 nt, Artificial Sequence
  HTT spacer sequence TTCN PAM
uucuuuuucuuuuuuuuuuu

SEQ ID NO: 38715 - RNA, 20 nt, Artificial Sequence
  HTT spacer sequence TTCN PAM
uuuucuuuuuuuuuuuuuuu

SEQ ID NO: 38716 - RNA, 20 nt, Artificial Sequence
  HTT spacer sequence TTCN PAM
uuuuuuuuuuuuuugagacg

SEQ ID NO: 38717 - RNA, 20 nt, Artificial Sequence
  HTT spacer sequence TTCN PAM
agcgauucuccugccucagc

SEQ ID NO: 38718 - RNA, 20 nt, Artificial Sequence
  HTT spacer sequence TTCN PAM
ccugccucagccucccgagu

SEQ ID NO: 38719 - RNA, 20 nt, Artificial Sequence
  HTT spacer sequence TTCN PAM
ccauguuggccaggcugguc

SEQ ID NO: 38720 - RNA, 20 nt, Artificial Sequence
  HTT spacer sequence TTCN PAM
agaccagccuggccaacaug

SEQ ID NO: 38721 - RNA, 20 nt, Artificial Sequence
  HTT spacer sequence TTCN PAM
gucaaaggcgguggguucug

SEQ ID NO: 38722 - RNA, 20 nt, Artificial Sequence
  HTT spacer sequence TTCN PAM
ggccccuccuuugcacaugg

SEQ ID NO: 38723 - RNA, 20 nt, Artificial Sequence
  HTT spacer sequence TTCN PAM
augugcaaaggaggggccag

SEQ ID NO: 38724 - RNA, 20 nt, Artificial Sequence
  HTT spacer sequence TTCN PAM
ccauuugcccaguaggauug

SEQ ID NO: 38725 - RNA, 20 nt, Artificial Sequence
  HTT spacer sequence TTCN PAM
aggucggaggagcggccggu

SEQ ID NO: 38726 - RNA, 20 nt, Artificial Sequence
  HTT spacer sequence TTCN PAM
ccggccgcuccuccgaccug

SEQ ID NO: 38727 - RNA, 20 nt, Artificial Sequence
  HTT spacer sequence TTCN PAM
ucaccggccgcuccuccgac

SEQ ID NO: 38728 - RNA, 20 nt, Artificial Sequence
  HTT spacer sequence TTCN PAM
gcagguggcagcucugcacc

SEQ ID NO: 38729 - RNA, 20 nt, Artificial Sequence
  HTT spacer sequence TTCN PAM
ucugcagguggcagcucugc

SEQ ID NO: 38730 - RNA, 20 nt, Artificial Sequence
  HTT spacer sequence TTCN PAM
accuggccucuggcaggaug

SEQ ID NO: 38731 - RNA, 20 nt, Artificial Sequence
  HTT spacer sequence TTCN PAM
gagggguauuuugaggaacc

SEQ ID NO: 38732 - RNA, 20 nt, Artificial Sequence
  HTT spacer sequence TTCN PAM
ucaaaauaccccucagaagg

SEQ ID NO: 38733 - RNA, 20 nt, Artificial Sequence
  HTT spacer sequence TTCN PAM
ugcuggagacuggagccuca

SEQ ID NO: 38734 - RNA, 20 nt, Artificial Sequence
  HTT spacer sequence TTCN PAM
ucggacacaggccagggccu

SEQ ID NO: 38735 - RNA, 20 nt, Artificial Sequence
  HTT spacer sequence TTCN PAM
cuccgaguaagaacguccua

SEQ ID NO: 38736 - RNA, 20 nt, Artificial Sequence
  HTT spacer sequence TTCN PAM
uacucggagugaaccccaga

SEQ ID NO: 38737 - RNA, 20 nt, Artificial Sequence
  HTT spacer sequence TTCN PAM
uucuugccuggaacgcacag

SEQ ID NO: 38738 - RNA, 20 nt, Artificial Sequence
  HTT spacer sequence TTCN PAM
ugccuggaacgcacaguuug

SEQ ID NO: 38739 - RNA, 20 nt, Artificial Sequence
  HTT spacer sequence TTCN PAM
aggcaagaaugaaaaaguau

SEQ ID NO: 38740 - RNA, 20 nt, Artificial Sequence
  HTT spacer sequence TTCN PAM
ggauccaucaaucagggcau

SEQ ID NO: 38741 - RNA, 20 nt, Artificial Sequence
  HTT spacer sequence TTCN PAM
uuuucgggauccaucaauca

SEQ ID NO: 38742 - RNA, 20 nt, Artificial Sequence
  HTT spacer sequence TTCN PAM
aucugcuuucauuuucggga

SEQ ID NO: 38743 - RNA, 20 nt, Artificial Sequence
  HTT spacer sequence TTCN PAM
ggagagagcucccccagcuc

SEQ ID NO: 38744 - RNA, 20 nt, Artificial Sequence
  HTT spacer sequence TTCN PAM
cuucaggagagagcuccccc

SEQ ID NO: 38745 - RNA, 20 nt, Artificial Sequence
  HTT spacer sequence TTCN PAM
ucaggcgucagaggccauuu

SEQ ID NO: 38746 - RNA, 20 nt, Artificial Sequence
  HTT spacer sequence TTCN PAM
aggaggcuuuuauucagcuc

SEQ ID NO: 38747 - RNA, 20 nt, Artificial Sequence
  HTT spacer sequence TTCN PAM
gcucuguuuggagcaucagg

SEQ ID NO: 38748 - RNA, 20 nt, Artificial Sequence
  HTT spacer sequence TTCN PAM
acugccuccuuagcaaugac

SEQ ID NO: 38749 - RNA, 20 nt, Artificial Sequence
  HTT spacer sequence TTCN PAM
caugcacagcccuguugagu

SEQ ID NO: 38750 - RNA, 20 nt, Artificial Sequence
  HTT spacer sequence TTCN PAM
gggugcuggagauaucaugg

SEQ ID NO: 38751 - RNA, 20 nt, Artificial Sequence
  HTT spacer sequence TTCN PAM
ccgcaugggagcauaagcuc

SEQ ID NO: 38752 - RNA, 20 nt, Artificial Sequence
  HTT spacer sequence TTCN PAM
cuacugacccaugugucuuc

SEQ ID NO: 38753 - RNA, 20 nt, Artificial Sequence
  HTT spacer sequence TTCN PAM
agcacuuaucacaaccugca

SEQ ID NO: 38754 - RNA, 20 nt, Artificial Sequence
  HTT spacer sequence TTCN PAM
cagcuccacguaugucugcc

SEQ ID NO: 38755 - RNA, 20 nt, Artificial Sequence
  HTT spacer sequence TTCN PAM
cuguguggccacuguuccca

SEQ ID NO: 38756 - RNA, 20 nt, Artificial Sequence
  HTT spacer sequence TTCN PAM
cacuggccguucccugugug

SEQ ID NO: 38757 - RNA, 20 nt, Artificial Sequence
  HTT spacer sequence TTCN PAM
guggccuggcugcuggccac

SEQ ID NO: 38758 - RNA, 20 nt, Artificial Sequence
  HTT spacer sequence TTCN PAM
ugcuuuucaagcuuaguggg

SEQ ID NO: 38759 - RNA, 20 nt, Artificial Sequence
  HTT spacer sequence TTCN PAM
agcuuagugggagucuuuug

SEQ ID NO: 38760 - RNA, 20 nt, Artificial Sequence
  HTT spacer sequence TTCN PAM
accaguuucaaacucuuucu

SEQ ID NO: 38761 - RNA, 20 nt, Artificial Sequence
  HTT spacer sequence TTCN PAM
aacucuuucuagaagcucca

SEQ ID NO: 38762 - RNA, 20 nt, Artificial Sequence
  HTT spacer sequence TTCN PAM
agaagcuccagcuuucccaa

SEQ ID NO: 38763 - RNA, 20 nt, Artificial Sequence
  HTT spacer sequence TTCN PAM
agaaagaguuugaaacuggu

SEQ ID NO: 38764 - RNA, 20 nt, Artificial Sequence
  HTT spacer sequence TTCN PAM
caaagcugaauucucuauga

SEQ ID NO: 38765 - RNA, 20 nt, Artificial Sequence
  HTT spacer sequence TTCN PAM
gcuuugggaaagcuggagcu

SEQ ID NO: 38766 - RNA, 20 nt, Artificial Sequence
  HTT spacer sequence TTCN PAM
cuaugagccuccuuggccgg

SEQ ID NO: 38767 - RNA, 20 nt, Artificial Sequence
  HTT spacer sequence TTCN PAM
aggaggugacucaaacacac

SEQ ID NO: 38768 - RNA, 20 nt, Artificial Sequence
  HTT spacer sequence TTCN PAM
auuugggcagcaacuugccu

SEQ ID NO: 38769 - RNA, 20 nt, Artificial Sequence
  HTT spacer sequence TTCN PAM
ccugcugacccaccugccaa

SEQ ID NO: 38770 - RNA, 20 nt, Artificial Sequence
  HTT spacer sequence TTCN PAM
gaaaaaucucccucuggcug

SEQ ID NO: 38771 - RNA, 20 nt, Artificial Sequence
  HTT spacer sequence TTCN PAM
gaacccugagucaaaccaug

SEQ ID NO: 38772 - RNA, 20 nt, Artificial Sequence
  HTT spacer sequence TTCN PAM
cacaggcaggccgagggcac

SEQ ID NO: 38773 - RNA, 20 nt, Artificial Sequence
  HTT spacer sequence TTCN PAM
guggagcccaaaggggagcu

SEQ ID NO: 38774 - RNA, 20 nt, Artificial Sequence
  HTT spacer sequence TTCN PAM
cuucacucugaggguccugg

SEQ ID NO: 38775 - RNA, 20 nt, Artificial Sequence
  HTT spacer sequence TTCN PAM
cucugaggguccuggagcuc

SEQ ID NO: 38776 - RNA, 20 nt, Artificial Sequence
  HTT spacer sequence TTCN PAM
agcugccagaugacgccgcu

SEQ ID NO: 38777 - RNA, 20 nt, Artificial Sequence
  HTT spacer sequence TTCN PAM
caaccacagggucagcggcg

SEQ ID NO: 38778 - RNA, 20 nt, Artificial Sequence
  HTT spacer sequence TTCN PAM
cggcaggugcuauggcagcc

SEQ ID NO: 38779 - RNA, 20 nt, Artificial Sequence
  HTT spacer sequence TTCN PAM
gcuucucggcaggugcuaug

SEQ ID NO: 38780 - RNA, 20 nt, Artificial Sequence
  HTT spacer sequence TTCN PAM
uucugcuucucggcaggugc

SEQ ID NO: 38781 - RNA, 20 nt, Artificial Sequence
  HTT spacer sequence TTCN PAM
agcuccgggacccacccgcc

SEQ ID NO: 38782 - RNA, 20 nt, Artificial Sequence
  HTT spacer sequence TTCN PAM
uggguggugucuugccuacg

SEQ ID NO: 38783 - RNA, 20 nt, Artificial Sequence
  HTT spacer sequence TTCN PAM
cagcaucuaggguggcacag

SEQ ID NO: 38784 - RNA, 20 nt, Artificial Sequence
  HTT spacer sequence TTCN PAM
ccagccuccuaacagggagc

SEQ ID NO: 38785 - RNA, 20 nt, Artificial Sequence
  HTT spacer sequence TTCN PAM
cucucgagggcuugugacug

SEQ ID NO: 38786 - RNA, 20 nt, Artificial Sequence
  HTT spacer sequence TTCN PAM
ugccagggccgcgggcaccc

SEQ ID NO: 38787 - RNA, 20 nt, Artificial Sequence
  HTT spacer sequence TTCN PAM
aaaugauguagcaacuucuu

SEQ ID NO: 38788 - RNA, 20 nt, Artificial Sequence
  HTT spacer sequence TTCN PAM
ucacccugaaacugcuguag

SEQ ID NO: 38789 - RNA, 20 nt, Artificial Sequence
  HTT spacer sequence TTCN PAM
cccugaaacugcuguagagu

SEQ ID NO: 38790 - RNA, 20 nt, Artificial Sequence
  HTT spacer sequence TTCN PAM
gggugaagaaguugcuacau

SEQ ID NO: 38791 - RNA, 20 nt, Artificial Sequence
  HTT spacer sequence TTCN PAM
guaacugccaggcauccggg

SEQ ID NO: 38792 - RNA, 20 nt, Artificial Sequence
  HTT spacer sequence TTCN PAM
aacccaagcacagcagcgac

SEQ ID NO: 38793 - RNA, 20 nt, Artificial Sequence
  HTT spacer sequence TTCN PAM
ucucgcccucucuaaucaga

SEQ ID NO: 38794 - RNA, 20 nt, Artificial Sequence
  HTT spacer sequence TTCN PAM
cgcccucucuaaucagaguc

SEQ ID NO: 38795 - RNA, 20 nt, Artificial Sequence
  HTT spacer sequence TTCN PAM
ugcccuuccaucaccuuaga

SEQ ID NO: 38796 - RNA, 20 nt, Artificial Sequence
  HTT spacer sequence TTCN PAM
aucaccuuagagaaggggca

SEQ ID NO: 38797 - RNA, 20 nt, Artificial Sequence
  HTT spacer sequence TTCN PAM
cuaaggugauggaagggcau

SEQ ID NO: 38798 - RNA, 20 nt, Artificial Sequence
  HTT spacer sequence TTCN PAM
ccaggcuggagcagcaucgc

SEQ ID NO: 38799 - RNA, 20 nt, Artificial Sequence
  HTT spacer sequence TTCN PAM
gcugacaugaggcgaugcug

SEQ ID NO: 38800 - RNA, 20 nt, Artificial Sequence
  HTT spacer sequence TTCN PAM
acagcugaguucugcugaca

SEQ ID NO: 38801 - RNA, 20 nt, Artificial Sequence
  HTT spacer sequence TTCN PAM
ucagcagcauguccuuaaca

SEQ ID NO: 38802 - RNA, 20 nt, Artificial Sequence
  HTT spacer sequence TTCN PAM
gauuucuuccuuaguuguug

SEQ ID NO: 38803 - RNA, 20 nt, Artificial Sequence
  HTT spacer sequence TTCN PAM
uccuuaguuguugguccauu

SEQ ID NO: 38804 - RNA, 20 nt, Artificial Sequence
  HTT spacer sequence TTCN PAM
uuaguuguugguccauuaag

SEQ ID NO: 38805 - RNA, 20 nt, Artificial Sequence
  HTT spacer sequence TTCN PAM
ccuuaauggaccaacaacua

SEQ ID NO: 38806 - RNA, 20 nt, Artificial Sequence
  HTT spacer sequence TTCN PAM
gcaaagcagcauguuaacau

SEQ ID NO: 38807 - RNA, 20 nt, Artificial Sequence
  HTT spacer sequence TTCN PAM
auguuaacaugcugcuuugc

SEQ ID NO: 38808 - RNA, 20 nt, Artificial Sequence
  HTT spacer sequence TTCN PAM
aguuuucaauguuaacaugc

SEQ ID NO: 38809 - RNA, 20 nt, Artificial Sequence
  HTT spacer sequence TTCN PAM
ccuguaguauuucauguugu

SEQ ID NO: 38810 - RNA, 20 nt, Artificial Sequence
  HTT spacer sequence TTCN PAM
uguuguuuugacguuuuuag

SEQ ID NO: 38811 - RNA, 20 nt, Artificial Sequence
  HTT spacer sequence TTCN PAM
cgccuguaaucccagcacuu

SEQ ID NO: 38812 - RNA, 20 nt, Artificial Sequence
  HTT spacer sequence TTCN PAM
agaccagccugaccaacaug

SEQ ID NO: 38813 - RNA, 20 nt, Artificial Sequence
  HTT spacer sequence TTCN PAM
ccauguuggucaggcugguc

SEQ ID NO: 38814 - RNA, 20 nt, Artificial Sequence
  HTT spacer sequence TTCN PAM
ccugccucagccucccaagu

SEQ ID NO: 38815 - RNA, 20 nt, Artificial Sequence
  HTT spacer sequence TTCN PAM
agcgauucuccugccucagc

SEQ ID NO: 38816 - RNA, 20 nt, Artificial Sequence
  HTT spacer sequence TTCN PAM
cugucacccaggcuggagug

SEQ ID NO: 38817 - RNA, 20 nt, Artificial Sequence
  HTT spacer sequence TTCN PAM
uauccugcuuauuuuauuua

SEQ ID NO: 38818 - RNA, 20 nt, Artificial Sequence
  HTT spacer sequence TTCN PAM
uuucuuauccugcuuauuuu

SEQ ID NO: 38819 - RNA, 20 nt, Artificial Sequence
  HTT spacer sequence TTCN PAM
ucauuucuuauccugcuuau

SEQ ID NO: 38820 - RNA, 20 nt, Artificial Sequence
  HTT spacer sequence TTCN PAM
gauuucauuuuuguauaccc

SEQ ID NO: 38821 - RNA, 20 nt, Artificial Sequence
  HTT spacer sequence TTCN PAM
uuuuuguauacccagaaagc

SEQ ID NO: 38822 - RNA, 20 nt, Artificial Sequence
  HTT spacer sequence TTCN PAM
ggguauacaaaaaugaaauc

SEQ ID NO: 38823 - RNA, 20 nt, Artificial Sequence
  HTT spacer sequence TTCN PAM
acaaguuuaagcugguuuaa

SEQ ID NO: 38824 - RNA, 20 nt, Artificial Sequence
  HTT spacer sequence TTCN PAM
uccucauuuucaacaaguuu

SEQ ID NO: 38825 - RNA, 20 nt, Artificial Sequence
  HTT spacer sequence TTCN PAM
ucauccucauuuucaacaag

SEQ ID NO: 38826 - RNA, 20 nt, Artificial Sequence
  HTT spacer sequence TTCN PAM
gaguuggaaugaauuuaacc

SEQ ID NO: 38827 - RNA, 20 nt, Artificial Sequence
  HTT spacer sequence TTCN PAM
aacucugaaugggauauuuc

SEQ ID NO: 38828 - RNA, 20 nt, Artificial Sequence
  HTT spacer sequence TTCN PAM
uuccaacucugaaugggaua

SEQ ID NO: 38829 - RNA, 20 nt, Artificial Sequence
  HTT spacer sequence TTCN PAM
ggguuaaauucauuccaacu

SEQ ID NO: 38830 - RNA, 20 nt, Artificial Sequence
  HTT spacer sequence TTCN PAM
uucuggguuaaauucauucc

SEQ ID NO: 38831 - RNA, 20 nt, Artificial Sequence
  HTT spacer sequence TTCN PAM
guagagguccuguuccuucu

SEQ ID NO: 38832 - RNA, 20 nt, Artificial Sequence
  HTT spacer sequence TTCN PAM
cuucaguagagguccuguuc

SEQ ID NO: 38833 - RNA, 20 nt, Artificial Sequence
  HTT spacer sequence TTCN PAM
guaagacugcauaguucucu

SEQ ID NO: 38834 - RNA, 20 nt, Artificial Sequence
  HTT spacer sequence TTCN PAM
ccagcgcucagguauuauuu

SEQ ID NO: 38835 - RNA, 20 nt, Artificial Sequence
  HTT spacer sequence TTCN PAM
cacacuccugaaagcuccaa

SEQ ID NO: 38836 - RNA, 20 nt, Artificial Sequence
  HTT spacer sequence TTCN PAM
ggagugugcgaaguuucucc

SEQ ID NO: 38837 - RNA, 20 nt, Artificial Sequence
  HTT spacer sequence TTCN PAM
aaacauagucucaauaauau

SEQ ID NO: 38838 - RNA, 20 nt, Artificial Sequence
  HTT spacer sequence TTCN PAM
ugguuuugacauggacgcga

SEQ ID NO: 38839 - RNA, 20 nt, Artificial Sequence
  HTT spacer sequence TTCN PAM
uaugaaaaaagaacggggcc

SEQ ID NO: 38840 - RNA, 20 nt, Artificial Sequence
  HTT spacer sequence TTCN PAM
uaugaauuuaaacaucaucg

SEQ ID NO: 38841 - RNA, 20 nt, Artificial Sequence
  HTT spacer sequence TTCN PAM
uuuuucauaugaauuuaaac

SEQ ID NO: 38842 - RNA, 20 nt, Artificial Sequence
  HTT spacer sequence TTCN PAM
cacgcugacuggccuuggac

SEQ ID NO: 38843 - RNA, 20 nt, Artificial Sequence
  HTT spacer sequence TTCN PAM
aacuccccgacuccgaggga

SEQ ID NO: 38844 - RNA, 20 nt, Artificial Sequence
  HTT spacer sequence TTCN PAM
uccuggccuccagcagccac

SEQ ID NO: 38845 - RNA, 20 nt, Artificial Sequence
  HTT spacer sequence TTCN PAM
cgacguucguccuggccucc

SEQ ID NO: 38846 - RNA, 20 nt, Artificial Sequence
  HTT spacer sequence TTCN PAM
aggagcaauuuggugucccg

SEQ ID NO: 38847 - RNA, 20 nt, Artificial Sequence
  HTT spacer sequence TTCN PAM
gcuuuaggacgggacaccaa

SEQ ID NO: 38848 - RNA, 20 nt, Artificial Sequence
  HTT spacer sequence TTCN PAM
ucagcuuuaggacgggacac

SEQ ID NO: 38849 - RNA, 20 nt, Artificial Sequence
  HTT spacer sequence TTCN PAM
ucuggucagugccacuccua

SEQ ID NO: 38850 - RNA, 20 nt, Artificial Sequence
  HTT spacer sequence TTCN PAM
ccguguuagccaggaugauc

SEQ ID NO: 38851 - RNA, 20 nt, Artificial Sequence
  HTT spacer sequence TTCN PAM
ccuggcucagccucccaagu

SEQ ID NO: 38852 - RNA, 20 nt, Artificial Sequence
  HTT spacer sequence TTCN PAM
cgccauucuccuggcucagc

SEQ ID NO: 38853 - RNA, 20 nt, Artificial Sequence
  HTT spacer sequence TTCN PAM
uuaaaagugccaaagaacuu

SEQ ID NO: 38854 - RNA, 20 nt, Artificial Sequence
  HTT spacer sequence TTCN PAM
uuggcacuuuuaaugaauuu

SEQ ID NO: 38855 - RNA, 20 nt, Artificial Sequence
  HTT spacer sequence TTCN PAM
aaugaccaauauuaauacac

SEQ ID NO: 38856 - RNA, 20 nt, Artificial Sequence
  HTT spacer sequence TTCN PAM
aauguguauuaauauugguc

SEQ ID NO: 38857 - RNA, 20 nt, Artificial Sequence
  HTT spacer sequence TTCN PAM
aauaagauauucuaaugugu

SEQ ID NO: 38858 - RNA, 20 nt, Artificial Sequence
  HTT spacer sequence TTCN PAM
aaaggucucagguuuaauuu

SEQ ID NO: 38859 - RNA, 20 nt, Artificial Sequence
  HTT spacer sequence TTCN PAM
uuucaaaauagcaauaaacc

SEQ ID NO: 38860 - RNA, 20 nt, Artificial Sequence
  HTT spacer sequence TTCN PAM
aaauagcaauaaacccauga

SEQ ID NO: 38861 - RNA, 20 nt, Artificial Sequence
  HTT spacer sequence TTCN PAM
uacaauuguuauuuauguua

SEQ ID NO: 38862 - RNA, 20 nt, Artificial Sequence
  HTT spacer sequence TTCN PAM
aaaacaaaaaguuuucggga

SEQ ID NO: 38863 - RNA, 20 nt, Artificial Sequence
  HTT spacer sequence TTCN PAM
ggagaaguguggcauaguuu

SEQ ID NO: 38864 - RNA, 20 nt, Artificial Sequence
  HTT spacer sequence TTCN PAM
cccgaaaacuuuuuguuuug

SEQ ID NO: 38865 - RNA, 20 nt, Artificial Sequence
  HTT spacer sequence TTCN PAM
cuuaagccagagauuuacga

SEQ ID NO: 38866 - RNA, 20 nt, Artificial Sequence
  HTT spacer sequence TTCN PAM
caaccaaaacacccccaaag

SEQ ID NO: 38867 - RNA, 20 nt, Artificial Sequence
  HTT spacer sequence TTCN PAM
cuccuauacuucacaaccaa

SEQ ID NO: 38868 - RNA, 20 nt, Artificial Sequence
  HTT spacer sequence TTCN PAM
ccauucacuccuauacuuca

SEQ ID NO: 38869 - RNA, 20 nt, Artificial Sequence
  HTT spacer sequence TTCN PAM
uacccagauguguauuugaa

SEQ ID NO: 38870 - RNA, 20 nt, Artificial Sequence
  HTT spacer sequence TTCN PAM
aauacacaucuggguaagaa

SEQ ID NO: 38871 - RNA, 20 nt, Artificial Sequence
  HTT spacer sequence TTCN PAM
uuucaaauacacaucugggu

SEQ ID NO: 38872 - RNA, 20 nt, Artificial Sequence
  HTT spacer sequence TTCN PAM
uuuucuuuucaaauacacau

SEQ ID NO: 38873 - RNA, 20 nt, Artificial Sequence
  HTT spacer sequence TTCN PAM
uccgugauccuauuccaaca

SEQ ID NO: 38874 - RNA, 20 nt, Artificial Sequence
  HTT spacer sequence TTCN PAM
gugauccuauuccaacacug

SEQ ID NO: 38875 - RNA, 20 nt, Artificial Sequence
  HTT spacer sequence TTCN PAM
aacacuggacaggugguggu

SEQ ID NO: 38876 - RNA, 20 nt, Artificial Sequence
  HTT spacer sequence TTCN PAM
gcucacugcaagcuccgccu

SEQ ID NO: 38877 - RNA, 20 nt, Artificial Sequence
  HTT spacer sequence TTCN PAM
cugcaagcucugccucccgg

SEQ ID NO: 38878 - RNA, 20 nt, Artificial Sequence
  HTT spacer sequence TTCN PAM
cgccauucuccugccucagc

SEQ ID NO: 38879 - RNA, 20 nt, Artificial Sequence
  HTT spacer sequence TTCN PAM
ccugccucagccuccugagu

SEQ ID NO: 38880 - RNA, 20 nt, Artificial Sequence
  HTT spacer sequence TTCN PAM
cuguguuagccaggaugguc

SEQ ID NO: 38881 - RNA, 20 nt, Artificial Sequence
  HTT spacer sequence TTCN PAM
agcacuuugggaggccgagg

SEQ ID NO: 38882 - RNA, 20 nt, Artificial Sequence
  HTT spacer sequence TTCN PAM
acacacaaccggccaguaaa

SEQ ID NO: 38883 - RNA, 20 nt, Artificial Sequence
  HTT spacer sequence TTCN PAM
uugauaggguaucagauucc

SEQ ID NO: 38884 - RNA, 20 nt, Artificial Sequence
  HTT spacer sequence TTCN PAM
acuucauuucaggagaaucc

SEQ ID NO: 38885 - RNA, 20 nt, Artificial Sequence
  HTT spacer sequence TTCN PAM
uuucaggagaauccauuggu

SEQ ID NO: 38886 - RNA, 20 nt, Artificial Sequence
  HTT spacer sequence TTCN PAM
ggagaauccauugguccguc

SEQ ID NO: 38887 - RNA, 20 nt, Artificial Sequence
  HTT spacer sequence TTCN PAM
ccugaaaugaaguagaaguu

SEQ ID NO: 38888 - RNA, 20 nt, Artificial Sequence
  HTT spacer sequence TTCN PAM
aggacucuguccaucaugcc

SEQ ID NO: 38889 - RNA, 20 nt, Artificial Sequence
  HTT spacer sequence TTCN PAM
cuaaguuaugcggauauucc

SEQ ID NO: 38890 - RNA, 20 nt, Artificial Sequence
  HTT spacer sequence TTCN PAM
aaaugcugacacaguuccuu

SEQ ID NO: 38891 - RNA, 20 nt, Artificial Sequence
  HTT spacer sequence TTCN PAM
uuaaucaguauuuuaaaauc

SEQ ID NO: 38892 - RNA, 20 nt, Artificial Sequence
  HTT spacer sequence TTCN PAM
aagauuggugauaucgccaa

SEQ ID NO: 38893 - RNA, 20 nt, Artificial Sequence
  HTT spacer sequence TTCN PAM
guuggaaagguggugaacuc

SEQ ID NO: 38894 - RNA, 20 nt, Artificial Sequence
  HTT spacer sequence TTCN PAM
aacugaaagacuuuucuaag

SEQ ID NO: 38895 - RNA, 20 nt, Artificial Sequence
  HTT spacer sequence TTCN PAM
ccaccuuuccaacugaaaga

SEQ ID NO: 38896 - RNA, 20 nt, Artificial Sequence
  HTT spacer sequence TTCN PAM
gaauucugauuuuugcauga

SEQ ID NO: 38897 - RNA, 20 nt, Artificial Sequence
  HTT spacer sequence TTCN PAM
gaaagacaccaccaugaguu

SEQ ID NO: 38898 - RNA, 20 nt, Artificial Sequence
  HTT spacer sequence TTCN PAM
gauuuuugcaugaaagcuug

SEQ ID NO: 38899 - RNA, 20 nt, Artificial Sequence
  HTT spacer sequence TTCN PAM
ugcaaaaaucagaauucuga

SEQ ID NO: 38900 - RNA, 20 nt, Artificial Sequence
  HTT spacer sequence TTCN PAM
agcuuucaugcaaaaaucag

SEQ ID NO: 38901 - RNA, 20 nt, Artificial Sequence
  HTT spacer sequence TTCN PAM
uugaaugagacaggcucacu

SEQ ID NO: 38902 - RNA, 20 nt, Artificial Sequence
  HTT spacer sequence TTCN PAM
aagaaaauagcugacagcau

SEQ ID NO: 38903 - RNA, 20 nt, Artificial Sequence
  HTT spacer sequence TTCN PAM
uuuuccaaaaaaaaaaaguc

SEQ ID NO: 38904 - RNA, 20 nt, Artificial Sequence
  HTT spacer sequence TTCN PAM
aaaaaaaaaaagucugccag

SEQ ID NO: 38905 - RNA, 20 nt, Artificial Sequence
  HTT spacer sequence TTCN PAM
gccuuggguguccuggcaga

SEQ ID NO: 38906 - RNA, 20 nt, Artificial Sequence
  HTT spacer sequence TTCN PAM
agauccagacggcagcucag

SEQ ID NO: 38907 - RNA, 20 nt, Artificial Sequence
  HTT spacer sequence TTCN PAM
ucagcguggacguggggcag

SEQ ID NO: 38908 - RNA, 20 nt, Artificial Sequence
  HTT spacer sequence TTCN PAM
aguugcucgggcaggacguu

SEQ ID NO: 38909 - RNA, 20 nt, Artificial Sequence
  HTT spacer sequence TTCN PAM
acguccugcccgagcaacug

SEQ ID NO: 38910 - RNA, 20 nt, Artificial Sequence
  HTT spacer sequence TTCN PAM
cuccaucacggacauuugga

SEQ ID NO: 38911 - RNA, 20 nt, Artificial Sequence
  HTT spacer sequence TTCN PAM
aaauguccgugauggaguga

SEQ ID NO: 38912 - RNA, 20 nt, Artificial Sequence
  HTT spacer sequence TTCN PAM
cacugcagcugugcggugcg

SEQ ID NO: 38913 - RNA, 20 nt, Artificial Sequence
  HTT spacer sequence TTCN PAM
caccgcacagcugcagugug

SEQ ID NO: 38914 - RNA, 20 nt, Artificial Sequence
  HTT spacer sequence TTCN PAM
ugcucaggucuugccacauc

SEQ ID NO: 38915 - RNA, 20 nt, Artificial Sequence
  HTT spacer sequence TTCN PAM
cggagcugacaugcgcacug

SEQ ID NO: 38916 - RNA, 20 nt, Artificial Sequence
  HTT spacer sequence TTCN PAM
cggggucuucacggagcuga

SEQ ID NO: 38917 - RNA, 20 nt, Artificial Sequence
  HTT spacer sequence TTCN PAM
ucauagucugaugaucacgg

SEQ ID NO: 38918 - RNA, 20 nt, Artificial Sequence
  HTT spacer sequence TTCN PAM
caggucucggccuguggguc

SEQ ID NO: 38919 - RNA, 20 nt, Artificial Sequence
  HTT spacer sequence TTCN PAM
ggcagugguucucaggucuc

SEQ ID NO: 38920 - RNA, 20 nt, Artificial Sequence
  HTT spacer sequence TTCN PAM
cacacgcugucugugaugac

SEQ ID NO: 38921 - RNA, 20 nt, Artificial Sequence
  HTT spacer sequence TTCN PAM
accugacccuauccccagug

SEQ ID NO: 38922 - RNA, 20 nt, Artificial Sequence
  HTT spacer sequence TTCN PAM
aguugaggguggggcuagac

SEQ ID NO: 38923 - RNA, 20 nt, Artificial Sequence
  HTT spacer sequence TTCN PAM
aacauacuagacacuuacgu

SEQ ID NO: 38924 - RNA, 20 nt, Artificial Sequence
  HTT spacer sequence TTCN PAM
agggaaauaaggcuguaggg

SEQ ID NO: 38925 - RNA, 20 nt, Artificial Sequence
  HTT spacer sequence TTCN PAM
cuggaaagcaccucucuucu

SEQ ID NO: 38926 - RNA, 20 nt, Artificial Sequence
  HTT spacer sequence TTCN PAM
cucaccccacggcuccaauc

SEQ ID NO: 38927 - RNA, 20 nt, Artificial Sequence
  HTT spacer sequence TTCN PAM
aaaaaugucaugugagcgga

SEQ ID NO: 38928 - RNA, 20 nt, Artificial Sequence
  HTT spacer sequence TTCN PAM
gcugggacaagagagucccg

SEQ ID NO: 38929 - RNA, 20 nt, Artificial Sequence
  HTT spacer sequence TTCN PAM
auccuccccuaggccaggau

SEQ ID NO: 38930 - RNA, 20 nt, Artificial Sequence
  HTT spacer sequence TTCN PAM
ccaugcccgggcaacagcca

SEQ ID NO: 38931 - RNA, 20 nt, Artificial Sequence
  HTT spacer sequence TTCN PAM
gguuuuuccccaugcccggg

SEQ ID NO: 38932 - RNA, 20 nt, Artificial Sequence
  HTT spacer sequence TTCN PAM
gaguccuggagauggccacg

SEQ ID NO: 38933 - RNA, 20 nt, Artificial Sequence
  HTT spacer sequence TTCN PAM
cccacacgcuccaccuugcg

SEQ ID NO: 38934 - RNA, 20 nt, Artificial Sequence
  HTT spacer sequence TTCN PAM
gcccaaguucaucucagcug

SEQ ID NO: 38935 - RNA, 20 nt, Artificial Sequence
  HTT spacer sequence TTCN PAM
ucucagcuggguccggaggg

SEQ ID NO: 38936 - RNA, 20 nt, Artificial Sequence
  HTT spacer sequence TTCN PAM
agggguagggugcccucucc

SEQ ID NO: 38937 - RNA, 20 nt, Artificial Sequence
  HTT spacer sequence TTCN PAM
acuguaagaugcucguguuc

SEQ ID NO: 38938 - RNA, 20 nt, Artificial Sequence
  HTT spacer sequence TTCN PAM
aacuggcuuuuucuacugua

SEQ ID NO: 38939 - RNA, 20 nt, Artificial Sequence
  HTT spacer sequence TTCN PAM
aaaauagaagccaagaacug

SEQ ID NO: 38940 - RNA, 20 nt, Artificial Sequence
  HTT spacer sequence TTCN PAM
auuuuagaagguaaggcggu

SEQ ID NO: 38941 - RNA, 20 nt, Artificial Sequence
  HTT spacer sequence TTCN PAM
uggcuucuauuuuagaaggu

SEQ ID NO: 38942 - RNA, 20 nt, Artificial Sequence
  HTT spacer sequence TTCN PAM
cggcuuggcuggucaugucc

SEQ ID NO: 38943 - RNA, 20 nt, Artificial Sequence
  HTT spacer sequence TTCN PAM
caugugcgcaguguucacgg

SEQ ID NO: 38944 - RNA, 20 nt, Artificial Sequence
  HTT spacer sequence TTCN PAM
ugguacauccguggcuugug

SEQ ID NO: 38945 - RNA, 20 nt, Artificial Sequence
  HTT spacer sequence TTCN PAM
cugagcugaggggagccugu

SEQ ID NO: 38946 - RNA, 20 nt, Artificial Sequence
  HTT spacer sequence TTCN PAM
cugcccucuguuuaucuccg

SEQ ID NO: 38947 - RNA, 20 nt, Artificial Sequence
  HTT spacer sequence TTCN PAM
cugcuuuccgucaaggcuaa

SEQ ID NO: 38948 - RNA, 20 nt, Artificial Sequence
  HTT spacer sequence TTCN PAM
gucaaggcuaaucugcucuc

SEQ ID NO: 38949 - RNA, 20 nt, Artificial Sequence
  HTT spacer sequence TTCN PAM
uagggagugcaaggucgggc

SEQ ID NO: 38950 - RNA, 20 nt, Artificial Sequence
  HTT spacer sequence TTCN PAM
ccaaacgucacagccuuucu

SEQ ID NO: 38951 - RNA, 20 nt, Artificial Sequence
  HTT spacer sequence TTCN PAM
cugauccuuuuuccagguag

SEQ ID NO: 38952 - RNA, 20 nt, Artificial Sequence
  HTT spacer sequence TTCN PAM
agguagcccacaggcuacag

SEQ ID NO: 38953 - RNA, 20 nt, Artificial Sequence
  HTT spacer sequence TTCN PAM
cucgcccugggcacacccuc

SEQ ID NO: 38954 - RNA, 20 nt, Artificial Sequence
  HTT spacer sequence TTCN PAM
uaggaggucacggaggaagc

SEQ ID NO: 38955 - RNA, 20 nt, Artificial Sequence
  HTT spacer sequence TTCN PAM
uccgugaccuccuaggaaga

SEQ ID NO: 38956 - RNA, 20 nt, Artificial Sequence
  HTT spacer sequence TTCN PAM
aaagcugcagggcuuccucc

SEQ ID NO: 38957 - RNA, 20 nt, Artificial Sequence
  HTT spacer sequence TTCN PAM
cagugcugguguagcuuagu

SEQ ID NO: 38958 - RNA, 20 nt, Artificial Sequence
  HTT spacer sequence TTCN PAM
ccuuuggaaacgguuuuuag

SEQ ID NO: 38959 - RNA, 20 nt, Artificial Sequence
  HTT spacer sequence TTCN PAM
aaaggagaacuucccagugc

SEQ ID NO: 38960 - RNA, 20 nt, Artificial Sequence
  HTT spacer sequence TTCN PAM
gcucaugccagccugccuga

SEQ ID NO: 38961 - RNA, 20 nt, Artificial Sequence
  HTT spacer sequence TTCN PAM
uagcggcagaucaggcaggc

SEQ ID NO: 38962 - RNA, 20 nt, Artificial Sequence
  HTT spacer sequence TTCN PAM
cgcacaaguaccugcugcuc

SEQ ID NO: 38963 - RNA, 20 nt, Artificial Sequence
  HTT spacer sequence TTCN PAM
gagcagcagguacuugugcg

SEQ ID NO: 38964 - RNA, 20 nt, Artificial Sequence
  HTT spacer sequence TTCN PAM
gcaauauaccugcguuaaaa

SEQ ID NO: 38965 - RNA, 20 nt, Artificial Sequence
  HTT spacer sequence TTCN PAM
uguuaaugcuggcagaaugc

SEQ ID NO: 38966 - RNA, 20 nt, Artificial Sequence
  HTT spacer sequence TTCN PAM
gccagcauuaacaagaagca

SEQ ID NO: 38967 - RNA, 20 nt, Artificial Sequence
  HTT spacer sequence TTCN PAM
agaggaggagggcauucugc

SEQ ID NO: 38968 - RNA, 20 nt, Artificial Sequence
  HTT spacer sequence TTCN PAM
cccguucaagaggaggaggg

SEQ ID NO: 38969 - RNA, 20 nt, Artificial Sequence
  HTT spacer sequence TTCN PAM
aguguguggaggcacaguca

SEQ ID NO: 38970 - RNA, 20 nt, Artificial Sequence
  HTT spacer sequence TTCN PAM
aggcuuucucugcaauaaac

SEQ ID NO: 38971 - RNA, 20 nt, Artificial Sequence
  HTT spacer sequence TTCN PAM
cugcaauaaaccguggugca

SEQ ID NO: 38972 - RNA, 20 nt, Artificial Sequence
  HTT spacer sequence TTCN PAM
aaacucacuaguguacacaa

SEQ ID NO: 38973 - RNA, 20 nt, Artificial Sequence
  HTT spacer sequence TTCN PAM
ccuagaguuauaaguguuuu

SEQ ID NO: 38974 - RNA, 20 nt, Artificial Sequence
  HTT spacer sequence TTCN PAM
uuuccccuagaguuauaagu

SEQ ID NO: 38975 - RNA, 20 nt, Artificial Sequence
  HTT spacer sequence TTCN PAM
uguacaacuuuucguuuccc

SEQ ID NO: 38976 - RNA, 20 nt, Artificial Sequence
  HTT spacer sequence TTCN PAM
cuuuccuguacaacuuuucg

SEQ ID NO: 38977 - RNA, 20 nt, Artificial Sequence
  HTT spacer sequence TTCN PAM
acacagauaucccguuguua

SEQ ID NO: 38978 - RNA, 20 nt, Artificial Sequence
  HTT spacer sequence TTCN PAM
acaaacggugcuguaacaac

SEQ ID NO: 38979 - RNA, 20 nt, Artificial Sequence
  HTT spacer sequence TTCN PAM
ugaagauggauggccugugg

SEQ ID NO: 38980 - RNA, 20 nt, Artificial Sequence
  HTT spacer sequence TTCN PAM
agaaagaguccaaagccacu

SEQ ID NO: 38981 - RNA, 20 nt, Artificial Sequence
  HTT spacer sequence TTCN PAM
cuuuuuuaggaucugaaauu

SEQ ID NO: 38982 - RNA, 20 nt, Artificial Sequence
  HTT spacer sequence TTCN PAM
uguuaugaaccaaucaaagc

SEQ ID NO: 38983 - RNA, 20 nt, Artificial Sequence
  HTT spacer sequence TTCN PAM
uaacaugaauggggacauuu

SEQ ID NO: 38984 - RNA, 20 nt, Artificial Sequence
  HTT spacer sequence TTCN PAM
aaaaaaucggguuuugguau

SEQ ID NO: 38985 - RNA, 20 nt, Artificial Sequence
  HTT spacer sequence TTCN PAM
gacgcuacauucuggagugu

SEQ ID NO: 38986 - RNA, 20 nt, Artificial Sequence
  HTT spacer sequence TTCN PAM
ggaguguucuacugacacca

SEQ ID NO: 38987 - RNA, 20 nt, Artificial Sequence
  HTT spacer sequence TTCN PAM
acugacaccaucugccagga

SEQ ID NO: 38988 - RNA, 20 nt, Artificial Sequence
  HTT spacer sequence TTCN PAM
aagaauccccaccugugugc

SEQ ID NO: 38989 - RNA, 20 nt, Artificial Sequence
  HTT spacer sequence TTCN PAM
uggaaguguggguccuggca

SEQ ID NO: 38990 - RNA, 20 nt, Artificial Sequence
  HTT spacer sequence TTCN PAM
agagcagacagaugggguca

SEQ ID NO: 38991 - RNA, 20 nt, Artificial Sequence
  HTT spacer sequence TTCN PAM
ccugaccaucaguggccucu

SEQ ID NO: 38992 - RNA, 20 nt, Artificial Sequence
  HTT spacer sequence TTCN PAM
ugccgggcccugcugaccag

SEQ ID NO: 38993 - RNA, 20 nt, Artificial Sequence
  HTT spacer sequence TTCN PAM
gguaucucacuugucucaug

SEQ ID NO: 38994 - RNA, 20 nt, Artificial Sequence
  HTT spacer sequence TTCN PAM
ucagguaucucacuugucuc

SEQ ID NO: 38995 - RNA, 20 nt, Artificial Sequence
  HTT spacer sequence TTCN PAM
ugccaaaucuggcaaacugc

SEQ ID NO: 38996 - RNA, 20 nt, Artificial Sequence
  HTT spacer sequence TTCN PAM
uuuccauauugcuucuugcg

SEQ ID NO: 38997 - RNA, 20 nt, Artificial Sequence
  HTT spacer sequence TTCN PAM
auauugcuucuugcgcaaac

SEQ ID NO: 38998 - RNA, 20 nt, Artificial Sequence
  HTT spacer sequence TTCN PAM
ugcgcaaacagacgaggugg

SEQ ID NO: 38999 - RNA, 20 nt, Artificial Sequence
  HTT spacer sequence TTCN PAM
agggcccugaggcaguccug

SEQ ID NO: 39000 - RNA, 20 nt, Artificial Sequence
  HTT spacer sequence TTCN PAM
gugggagacagaaauaaaau

SEQ ID NO: 39001 - RNA, 20 nt, Artificial Sequence
  HTT spacer sequence TTCN PAM
gucucccacagaagcagcca

SEQ ID NO: 39002 - RNA, 20 nt, Artificial Sequence
  HTT spacer sequence TTCN PAM
caaccaugccagcguuauuu

SEQ ID NO: 39003 - RNA, 20 nt, Artificial Sequence
  HTT spacer sequence TTCN PAM
acguuugaagccaaaugcaa

SEQ ID NO: 39004 - RNA, 20 nt, Artificial Sequence
  HTT spacer sequence TTCN PAM
aacguggaaauaacgcuggc

SEQ ID NO: 39005 - RNA, 20 nt, Artificial Sequence
  HTT spacer sequence TTCN PAM
cucucaaaaauugcauuugg

SEQ ID NO: 39006 - RNA, 20 nt, Artificial Sequence
  HTT spacer sequence TTCN PAM
acacucccuccccuuuuggg

SEQ ID NO: 39007 - RNA, 20 nt, Artificial Sequence
  HTT spacer sequence TTCN PAM
acuccuacagcauggcauug

SEQ ID NO: 39008 - RNA, 20 nt, Artificial Sequence
  HTT spacer sequence TTCN PAM
gcagccucacgagccaaugc

SEQ ID NO: 39009 - RNA, 20 nt, Artificial Sequence
  HTT spacer sequence TTCN PAM
accugcugcaggcuggaagg

SEQ ID NO: 39010 - RNA, 20 nt, Artificial Sequence
  HTT spacer sequence TTCN PAM
agccugcagcagguggaacc

SEQ ID NO: 39011 - RNA, 20 nt, Artificial Sequence
  HTT spacer sequence TTCN PAM
caccacaucagccuuccagc

SEQ ID NO: 39012 - RNA, 20 nt, Artificial Sequence
  HTT spacer sequence TTCN PAM
ccucaggcugcccucccggc

SEQ ID NO: 39013 - RNA, 20 nt, Artificial Sequence
  HTT spacer sequence TTCN PAM
ugccuuucuccucaggcugc

SEQ ID NO: 39014 - RNA, 20 nt, Artificial Sequence
  HTT spacer sequence TTCN PAM
gaauguggugccacugucag

SEQ ID NO: 39015 - RNA, 20 nt, Artificial Sequence
  HTT spacer sequence TTCN PAM
gaagguuuuuccugccuuuc

SEQ ID NO: 39016 - RNA, 20 nt, Artificial Sequence
  HTT spacer sequence TTCN PAM
ccaagaaggagauggccuug

SEQ ID NO: 39017 - RNA, 20 nt, Artificial Sequence
  HTT spacer sequence TTCN PAM
uggggaacuuugcugacagu

SEQ ID NO: 39018 - RNA, 20 nt, Artificial Sequence
  HTT spacer sequence TTCN PAM
uagcaccccacgggcagaga

SEQ ID NO: 39019 - RNA, 20 nt, Artificial Sequence
  HTT spacer sequence TTCN PAM
ccaggcuccacggggcccca

SEQ ID NO: 39020 - RNA, 20 nt, Artificial Sequence
  HTT spacer sequence TTCN PAM
agccagcguagaucaggucu

SEQ ID NO: 39021 - RNA, 20 nt, Artificial Sequence
  HTT spacer sequence TTCN PAM
ccuccuugagggccaaccca

SEQ ID NO: 39022 - RNA, 20 nt, Artificial Sequence
  HTT spacer sequence TTCN PAM
cuuacucacccgugcugcca

SEQ ID NO: 39023 - RNA, 20 nt, Artificial Sequence
  HTT spacer sequence TTCN PAM
uccugacuuggagacccugu

SEQ ID NO: 39024 - RNA, 20 nt, Artificial Sequence
  HTT spacer sequence TTCN PAM
ggggcucuguccucugcgag

SEQ ID NO: 39025 - RNA, 20 nt, Artificial Sequence
  HTT spacer sequence TTCN PAM
aagccgcuccccaggggugc

SEQ ID NO: 39026 - RNA, 20 nt, Artificial Sequence
  HTT spacer sequence TTCN PAM
caggcgcaccugggagcugu

SEQ ID NO: 39027 - RNA, 20 nt, Artificial Sequence
  HTT spacer sequence TTCN PAM
caccugcgaaaggggagcgg

SEQ ID NO: 39028 - RNA, 20 nt, Artificial Sequence
  HTT spacer sequence TTCN PAM
caggugagaacaggguuccc

SEQ ID NO: 39029 - RNA, 20 nt, Artificial Sequence
  HTT spacer sequence TTCN PAM
ccuccccgcuccccuuucgc

SEQ ID NO: 39030 - RNA, 20 nt, Artificial Sequence
  HTT spacer sequence TTCN PAM
uccugcuccuccuccugcag

SEQ ID NO: 39031 - RNA, 20 nt, Artificial Sequence
  HTT spacer sequence TTCN PAM
gccagcuucuagaaccuucc

SEQ ID NO: 39032 - RNA, 20 nt, Artificial Sequence
  HTT spacer sequence TTCN PAM
agaaccuuccccacagugcu

SEQ ID NO: 39033 - RNA, 20 nt, Artificial Sequence
  HTT spacer sequence TTCN PAM
agaagcuggcagaagcccuc

SEQ ID NO: 39034 - RNA, 20 nt, Artificial Sequence
  HTT spacer sequence TTCN PAM
ccacagugcugcacugacca

SEQ ID NO: 39035 - RNA, 20 nt, Artificial Sequence
  HTT spacer sequence TTCN PAM
uuaguuccccgcaggguuag

SEQ ID NO: 39036 - RNA, 20 nt, Artificial Sequence
  HTT spacer sequence TTCN PAM
ccgcaggguuagacuccuga

SEQ ID NO: 39037 - RNA, 20 nt, Artificial Sequence
  HTT spacer sequence TTCN PAM
cuuguuuaauccucagcuca

SEQ ID NO: 39038 - RNA, 20 nt, Artificial Sequence
  HTT spacer sequence TTCN PAM
cgcucggaauuuggauucaa

SEQ ID NO: 39039 - RNA, 20 nt, Artificial Sequence
  HTT spacer sequence TTCN PAM
gagcgugaaugggcucucca

SEQ ID NO: 39040 - RNA, 20 nt, Artificial Sequence
  HTT spacer sequence TTCN PAM
accacggggcugacccccca

SEQ ID NO: 39041 - RNA, 20 nt, Artificial Sequence
  HTT spacer sequence TTCN PAM
aaaacgccuuugucuuuucc

SEQ ID NO: 39042 - RNA, 20 nt, Artificial Sequence
  HTT spacer sequence TTCN PAM
uguucaaagaacuuucaaga

SEQ ID NO: 39043 - RNA, 20 nt, Artificial Sequence
  HTT spacer sequence TTCN PAM
aagaacuuucaagagacuuu

SEQ ID NO: 39044 - RNA, 20 nt, Artificial Sequence
  HTT spacer sequence TTCN PAM
uugaacaggaaaagacaaag

SEQ ID NO: 39045 - RNA, 20 nt, Artificial Sequence
  HTT spacer sequence TTCN PAM
agagacuuuccaaguuuugu

SEQ ID NO: 39046 - RNA, 20 nt, Artificial Sequence
  HTT spacer sequence TTCN PAM
aaguuuuguucgggaacagu

SEQ ID NO: 39047 - RNA, 20 nt, Artificial Sequence
  HTT spacer sequence TTCN PAM
ggaacaguguggcuccccag

SEQ ID NO: 39048 - RNA, 20 nt, Artificial Sequence
  HTT spacer sequence TTCN PAM
cgaacaaaacuuggaaaguc

SEQ ID NO: 39049 - RNA, 20 nt, Artificial Sequence
  HTT spacer sequence TTCN PAM
ugauaauuagaaauaucaac

SEQ ID NO: 39050 - RNA, 20 nt, Artificial Sequence
  HTT spacer sequence TTCN PAM
aauuaucaugaaauuaaaau

SEQ ID NO: 39051 - RNA, 20 nt, Artificial Sequence
  HTT spacer sequence TTCN PAM
aaacuaauggaauuuuaaug

SEQ ID NO: 39052 - RNA, 20 nt, Artificial Sequence
  HTT spacer sequence TTCN PAM
aaggcugagcggcaguugau

SEQ ID NO: 39053 - RNA, 20 nt, Artificial Sequence
  HTT spacer sequence TTCN PAM
auuaguuucgaaggcugagc

SEQ ID NO: 39054 - RNA, 20 nt, Artificial Sequence
  HTT spacer sequence TTCN PAM
uagcuguaaccuaagcagcu

SEQ ID NO: 39055 - RNA, 20 nt, Artificial Sequence
  HTT spacer sequence TTCN PAM
cccagggccugccucccgca

SEQ ID NO: 39056 - RNA, 20 nt, Artificial Sequence
  HTT spacer sequence TTCN PAM
gcagcugccuguaagggaga

SEQ ID NO: 39057 - RNA, 20 nt, Artificial Sequence
  HTT spacer sequence TTCN PAM
cccuuacaggcagcugcuga

SEQ ID NO: 39058 - RNA, 20 nt, Artificial Sequence
  HTT spacer sequence TTCN PAM
auccccaaaaaagccugcug

SEQ ID NO: 39059 - RNA, 20 nt, Artificial Sequence
  HTT spacer sequence TTCN PAM
gcaggcuuuuuuggggauag

SEQ ID NO: 39060 - RNA, 20 nt, Artificial Sequence
  HTT spacer sequence TTCN PAM
aucucaauacaaauuucagc

SEQ ID NO: 39061 - RNA, 20 nt, Artificial Sequence
  HTT spacer sequence TTCN PAM
auuccaucucaauacaaauu

SEQ ID NO: 39062 - RNA, 20 nt, Artificial Sequence
  HTT spacer sequence TTCN PAM
uagucccacuugauaagaac

SEQ ID NO: 39063 - RNA, 20 nt, Artificial Sequence
  HTT spacer sequence TTCN PAM
cacacagauaagaagcuugu

SEQ ID NO: 39064 - RNA, 20 nt, Artificial Sequence
  HTT spacer sequence TTCN PAM
uaucucuaugucuuuuauuu

SEQ ID NO: 39065 - RNA, 20 nt, Artificial Sequence
  HTT spacer sequence TTCN PAM
cuuucuugccuuauuuucug

SEQ ID NO: 39066 - RNA, 20 nt, Artificial Sequence
  HTT spacer sequence TTCN PAM
ugccuuauuuucuggcuaug

SEQ ID NO: 39067 - RNA, 20 nt, Artificial Sequence
  HTT spacer sequence TTCN PAM
ggcuaugagcuccaguacaa

SEQ ID NO: 39068 - RNA, 20 nt, Artificial Sequence
  HTT spacer sequence TTCN PAM
acauuguacuggagcucaua

SEQ ID NO: 39069 - RNA, 20 nt, Artificial Sequence
  HTT spacer sequence TTCN PAM
ugagggucauugggcuguaa

SEQ ID NO: 39070 - RNA, 20 nt, Artificial Sequence
  HTT spacer sequence TTCN PAM
uuuucucuugauguccuugu

SEQ ID NO: 39071 - RNA, 20 nt, Artificial Sequence
  HTT spacer sequence TTCN PAM
cuugauguccuugucagguu

SEQ ID NO: 39072 - RNA, 20 nt, Artificial Sequence
  HTT spacer sequence TTCN PAM
uacaguaagugcaagagugu

SEQ ID NO: 39073 - RNA, 20 nt, Artificial Sequence
  HTT spacer sequence TTCN PAM
aucuuucucuuuuuucugaa

SEQ ID NO: 39074 - RNA, 20 nt, Artificial Sequence
  HTT spacer sequence TTCN PAM
cuuuuuucugaaaaaaauug

SEQ ID NO: 39075 - RNA, 20 nt, Artificial Sequence
  HTT spacer sequence TTCN PAM
gaaaaaaauuguguaaggau

SEQ ID NO: 39076 - RNA, 20 nt, Artificial Sequence
  HTT spacer sequence TTCN PAM
gaaaaaagagaaagauggaa

SEQ ID NO: 39077 - RNA, 20 nt, Artificial Sequence
  HTT spacer sequence TTCN PAM
uccuuaaauauuugaucugu

SEQ ID NO: 39078 - RNA, 20 nt, Artificial Sequence
  HTT spacer sequence TTCN PAM
uuaaauauuugaucuguucc

SEQ ID NO: 39079 - RNA, 20 nt, Artificial Sequence
  HTT spacer sequence TTCN PAM
gugauuuccacucuuauuuu

SEQ ID NO: 39080 - RNA, 20 nt, Artificial Sequence
  HTT spacer sequence TTCN PAM
acucuuauuuuugucauucc

SEQ ID NO: 39081 - RNA, 20 nt, Artificial Sequence
  HTT spacer sequence TTCN PAM
cuuccuucuauuuacuuuag

SEQ ID NO: 39082 - RNA, 20 nt, Artificial Sequence
  HTT spacer sequence TTCN PAM
uucuauuuacuuuagguuua

SEQ ID NO: 39083 - RNA, 20 nt, Artificial Sequence
  HTT spacer sequence TTCN PAM
auuuacuuuagguuuaauuu

SEQ ID NO: 39084 - RNA, 20 nt, Artificial Sequence
  HTT spacer sequence TTCN PAM
agcuucuuaauguggaagcu

SEQ ID NO: 39085 - RNA, 20 nt, Artificial Sequence
  HTT spacer sequence TTCN PAM
uaauguggaagcucagauca

SEQ ID NO: 39086 - RNA, 20 nt, Artificial Sequence
  HTT spacer sequence TTCN PAM
acauuaagaagcuagaaaau

SEQ ID NO: 39087 - RNA, 20 nt, Artificial Sequence
  HTT spacer sequence TTCN PAM
aacuaguuuuuaaauauaaa

SEQ ID NO: 39088 - RNA, 20 nt, Artificial Sequence
  HTT spacer sequence TTCN PAM
uuacuauucaguuaaaaaua

SEQ ID NO: 39089 - RNA, 20 nt, Artificial Sequence
  HTT spacer sequence TTCN PAM
guuaaaaauaauuuucuagu

SEQ ID NO: 39090 - RNA, 20 nt, Artificial Sequence
  HTT spacer sequence TTCN PAM
aguuuucuuugugauaucuu

SEQ ID NO: 39091 - RNA, 20 nt, Artificial Sequence
  HTT spacer sequence TTCN PAM
uugugauaucuuguuugacc

SEQ ID NO: 39092 - RNA, 20 nt, Artificial Sequence
  HTT spacer sequence TTCN PAM
uucuugguaaauguaccaug

SEQ ID NO: 39093 - RNA, 20 nt, Artificial Sequence
  HTT spacer sequence TTCN PAM
ugguaaauguaccaugugcu

SEQ ID NO: 39094 - RNA, 20 nt, Artificial Sequence
  HTT spacer sequence TTCN PAM
agagcacaugguacauuuac

SEQ ID NO: 39095 - RNA, 20 nt, Artificial Sequence
  HTT spacer sequence TTCN PAM
auauguguuaauuagguuag

SEQ ID NO: 39096 - RNA, 20 nt, Artificial Sequence
  HTT spacer sequence TTCN PAM
uuuuuuuuuuuuuuuuuuga

SEQ ID NO: 39097 - RNA, 20 nt, Artificial Sequence
  HTT spacer sequence TTCN PAM
uacugauuauuuugucuggu

SEQ ID NO: 39098 - RNA, 20 nt, Artificial Sequence
  HTT spacer sequence TTCN PAM
caacaauuuauaauagaaua

SEQ ID NO: 39099 - RNA, 20 nt, Artificial Sequence
  HTT spacer sequence TTCN PAM
auuauaaauuguugggaaaa

SEQ ID NO: 39100 - RNA, 20 nt, Artificial Sequence
  HTT spacer sequence TTCN PAM
gauuauuuuucuuuuuuuag

SEQ ID NO: 39101 - RNA, 20 nt, Artificial Sequence
  HTT spacer sequence TTCN PAM
uuuuuuaguucuuacaauuu

SEQ ID NO: 39102 - RNA, 20 nt, Artificial Sequence
  HTT spacer sequence TTCN PAM
uacaauuuuugccucaaaug

SEQ ID NO: 39103 - RNA, 20 nt, Artificial Sequence
  HTT spacer sequence TTCN PAM
aacauuugaggcaaaaauug

SEQ ID NO: 39104 - RNA, 20 nt, Artificial Sequence
  HTT spacer sequence TTCN PAM
uaugguauuuuuccauggua

SEQ ID NO: 39105 - RNA, 20 nt, Artificial Sequence
  HTT spacer sequence TTCN PAM
augguauuucuuuuuuuuuu

SEQ ID NO: 39106 - RNA, 20 nt, Artificial Sequence
  HTT spacer sequence TTCN PAM
uuuuuuuuuuuuguuaauuc

SEQ ID NO: 39107 - RNA, 20 nt, Artificial Sequence
  HTT spacer sequence TTCN PAM
uuuacuuuuaaccuaaacuu

SEQ ID NO: 39108 - RNA, 20 nt, Artificial Sequence
  HTT spacer sequence TTCN PAM
uuaauuuaccucaaucuacu

SEQ ID NO: 39109 - RNA, 20 nt, Artificial Sequence
  HTT spacer sequence TTCN PAM
aaguagauugagguaaauua

SEQ ID NO: 39110 - RNA, 20 nt, Artificial Sequence
  HTT spacer sequence TTCN PAM
acuuauaauuccauuucccu

SEQ ID NO: 39111 - RNA, 20 nt, Artificial Sequence
  HTT spacer sequence TTCN PAM
ugcagcuuuuguuuaucuga

SEQ ID NO: 39112 - RNA, 20 nt, Artificial Sequence
  HTT spacer sequence TTCN PAM
gauaaacaaaagcugcagga

SEQ ID NO: 39113 - RNA, 20 nt, Artificial Sequence
  HTT spacer sequence TTCN PAM
uuuuuuaaggauguguucac

SEQ ID NO: 39114 - RNA, 20 nt, Artificial Sequence
  HTT spacer sequence TTCN PAM
guuugagaaaauuuuggcca

SEQ ID NO: 39115 - RNA, 20 nt, Artificial Sequence
  HTT spacer sequence TTCN PAM
caaacugaauuuaaaaaaau

SEQ ID NO: 39116 - RNA, 20 nt, Artificial Sequence
  HTT spacer sequence TTCN PAM
uuagauucuccccauuuuac

SEQ ID NO: 39117 - RNA, 20 nt, Artificial Sequence
  HTT spacer sequence TTCN PAM
ccccauuuuaccuguacucu

SEQ ID NO: 39118 - RNA, 20 nt, Artificial Sequence
  HTT spacer sequence TTCN PAM
gugcacugcaaaaaaaaaaa

SEQ ID NO: 39119 - RNA, 20 nt, Artificial Sequence
  HTT spacer sequence TTCN PAM
gauaccaugauagugucauu

SEQ ID NO: 39120 - RNA, 20 nt, Artificial Sequence
  HTT spacer sequence TTCN PAM
uaauagcaccagugucuacu

SEQ ID NO: 39121 - RNA, 20 nt, Artificial Sequence
  HTT spacer sequence TTCN PAM
ucauauuucuauuugugauu

SEQ ID NO: 39122 - RNA, 20 nt, Artificial Sequence
  HTT spacer sequence TTCN PAM
uauuucuauuugugauuguu

SEQ ID NO: 39123 - RNA, 20 nt, Artificial Sequence
  HTT spacer sequence TTCN PAM
auuugugauuguuuccagag

SEQ ID NO: 39124 - RNA, 20 nt, Artificial Sequence
  HTT spacer sequence TTCN PAM
agagcuucucacacaugagc

SEQ ID NO: 39125 - RNA, 20 nt, Artificial Sequence
  HTT spacer sequence TTCN PAM
cacacaugagcagagcaguc

SEQ ID NO: 39126 - RNA, 20 nt, Artificial Sequence
  HTT spacer sequence TTCN PAM
cuuacccauugugauagcac

SEQ ID NO: 39127 - RNA, 20 nt, Artificial Sequence
  HTT spacer sequence TTCN PAM
ucuucccuuacccauuguga

SEQ ID NO: 39128 - RNA, 20 nt, Artificial Sequence
  HTT spacer sequence TTCN PAM
aggcuuccucuucccuuacc

SEQ ID NO: 39129 - RNA, 20 nt, Artificial Sequence
  HTT spacer sequence TTCN PAM
gccauguacagcacagaguu

SEQ ID NO: 39130 - RNA, 20 nt, Artificial Sequence
  HTT spacer sequence TTCN PAM
aaagcacauccucacucuug

SEQ ID NO: 39131 - RNA, 20 nt, Artificial Sequence
  HTT spacer sequence TTCN PAM
gcaucuucccaaagauggga

SEQ ID NO: 39132 - RNA, 20 nt, Artificial Sequence
  HTT spacer sequence TTCN PAM
caaagaugggacaucuugac

SEQ ID NO: 39133 - RNA, 20 nt, Artificial Sequence
  HTT spacer sequence TTCN PAM
gagggugauuauaaggucaa

SEQ ID NO: 39134 - RNA, 20 nt, Artificial Sequence
  HTT spacer sequence TTCN PAM
uuugugguucugagggugau

SEQ ID NO: 39135 - RNA, 20 nt, Artificial Sequence
  HTT spacer sequence TTCN PAM
aucuaauugcuuuaacagca

SEQ ID NO: 39136 - RNA, 20 nt, Artificial Sequence
  HTT spacer sequence TTCN PAM
agauguauuagaagaguuaa

SEQ ID NO: 39137 - RNA, 20 nt, Artificial Sequence
  HTT spacer sequence TTCN PAM
aauacaucuugaauacugua

SEQ ID NO: 39138 - RNA, 20 nt, Artificial Sequence
  HTT spacer sequence TTCN PAM
uuuuuuuggggguaagccuu

SEQ ID NO: 39139 - RNA, 20 nt, Artificial Sequence
  HTT spacer sequence TTCN PAM
uuccuuuuuuuggggguaag

SEQ ID NO: 39140 - RNA, 20 nt, Artificial Sequence
  HTT spacer sequence TTCN PAM
uuucuuuccuuuuuuugggg

SEQ ID NO: 39141 - RNA, 20 nt, Artificial Sequence
  HTT spacer sequence TTCN PAM
aauuaaaaaauauaucuaaa

SEQ ID NO: 39142 - RNA, 20 nt, Artificial Sequence
  HTT spacer sequence TTCN PAM
aguaaaaucuaaagaaauca

SEQ ID NO: 39143 - RNA, 20 nt, Artificial Sequence
  HTT spacer sequence TTCN PAM
uuagauuuuacuagaaugcu

SEQ ID NO: 39144 - RNA, 20 nt, Artificial Sequence
  HTT spacer sequence TTCN PAM
gauuucuuuagauuuuacua

SEQ ID NO: 39145 - RNA, 20 nt, Artificial Sequence
  HTT spacer sequence TTCN PAM
uuguucugauuucuuuagau

SEQ ID NO: 39146 - RNA, 20 nt, Artificial Sequence
  HTT spacer sequence TTCN PAM
uuucuuuguucugauuucuu

SEQ ID NO: 39147 - RNA, 20 nt, Artificial Sequence
  HTT spacer sequence TTCN PAM
auacagauuauuuucugcca

SEQ ID NO: 39148 - RNA, 20 nt, Artificial Sequence
  HTT spacer sequence TTCN PAM
gccauuuuagauuaaggaau

SEQ ID NO: 39149 - RNA, 20 nt, Artificial Sequence
  HTT spacer sequence TTCN PAM
uuaaucuaaaauggcagaaa

SEQ ID NO: 39150 - RNA, 20 nt, Artificial Sequence
  HTT spacer sequence TTCN PAM
auugagauuauuccuuaauc

SEQ ID NO: 39151 - RNA, 20 nt, Artificial Sequence
  HTT spacer sequence TTCN PAM
caucucucuucaauugagau

SEQ ID NO: 39152 - RNA, 20 nt, Artificial Sequence
  HTT spacer sequence TTCN PAM
gguacuuuaaaaauaauauc

SEQ ID NO: 39153 - RNA, 20 nt, Artificial Sequence
  HTT spacer sequence TTCN PAM
uucaaauuugccagugcuga

SEQ ID NO: 39154 - RNA, 20 nt, Artificial Sequence
  HTT spacer sequence TTCN PAM
aaagcccuucuuucaaauuu

SEQ ID NO: 39155 - RNA, 20 nt, Artificial Sequence
  HTT spacer sequence TTCN PAM
uacaguauuucuaaagcccu

SEQ ID NO: 39156 - RNA, 20 nt, Artificial Sequence
  HTT spacer sequence TTCN PAM
ccaucucuuaaagcaacacc

SEQ ID NO: 39157 - RNA, 20 nt, Artificial Sequence
  HTT spacer sequence TTCN PAM
ucacaaaaaucacugugaug

SEQ ID NO: 39158 - RNA, 20 nt, Artificial Sequence
  HTT spacer sequence TTCN PAM
uaaauuucaucacaaaaauc

SEQ ID NO: 39159 - RNA, 20 nt, Artificial Sequence
  HTT spacer sequence TTCN PAM
aagaccagccuggccaacau

SEQ ID NO: 39160 - RNA, 20 nt, Artificial Sequence
  HTT spacer sequence TTCN PAM
ccauguuggccaggcugguc

SEQ ID NO: 39161 - RNA, 20 nt, Artificial Sequence
  HTT spacer sequence TTCN PAM
acuaaaaauacaaaaacuag

SEQ ID NO: 39162 - RNA, 20 nt, Artificial Sequence
  HTT spacer sequence TTCN PAM
guucacucuguuguuccugu

SEQ ID NO: 39163 - RNA, 20 nt, Artificial Sequence
  HTT spacer sequence TTCN PAM
cuggacucaaaucccaaacu

SEQ ID NO: 39164 - RNA, 20 nt, Artificial Sequence
  HTT spacer sequence TTCN PAM
cuuagaagaaaaucaacacu

SEQ ID NO: 39165 - RNA, 20 nt, Artificial Sequence
  HTT spacer sequence TTCN PAM
aagagaaacguauuuucacu

SEQ ID NO: 39166 - RNA, 20 nt, Artificial Sequence
  HTT spacer sequence TTCN PAM
ucuaagagaaacguauuuuc

SEQ ID NO: 39167 - RNA, 20 nt, Artificial Sequence
  HTT spacer sequence TTCN PAM
cagauaaagauaauagaauc

SEQ ID NO: 39168 - RNA, 20 nt, Artificial Sequence
  HTT spacer sequence TTCN PAM
aagccuaugcagugaaauuu

SEQ ID NO: 39169 - RNA, 20 nt, Artificial Sequence
  HTT spacer sequence TTCN PAM
gccauauccaauccacuucu

SEQ ID NO: 39170 - RNA, 20 nt, Artificial Sequence
  HTT spacer sequence TTCN PAM
uuucagccauauccaaucca

SEQ ID NO: 39171 - RNA, 20 nt, Artificial Sequence
  HTT spacer sequence TTCN PAM
cugauuuucuuuucagccau

SEQ ID NO: 39172 - RNA, 20 nt, Artificial Sequence
  HTT spacer sequence TTCN PAM
aauucacugauuuucuuuuc

SEQ ID NO: 39173 - RNA, 20 nt, Artificial Sequence
  HTT spacer sequence TTCN PAM
auugcuguaucuucaaauuc

SEQ ID NO: 39174 - RNA, 20 nt, Artificial Sequence
  HTT spacer sequence TTCN PAM
gacugggccauuucuauugc

SEQ ID NO: 39175 - RNA, 20 nt, Artificial Sequence
  HTT spacer sequence TTCN PAM
ugcugcugcaaucauuuuua

SEQ ID NO: 39176 - RNA, 20 nt, Artificial Sequence
  HTT spacer sequence TTCN PAM
accauuuuuucuaccucauu

SEQ ID NO: 39177 - RNA, 20 nt, Artificial Sequence
  HTT spacer sequence TTCN PAM
ucaaccauuuuuucuaccuc

SEQ ID NO: 39178 - RNA, 20 nt, Artificial Sequence
  HTT spacer sequence TTCN PAM
aaaauguggugaaaaacaua

SEQ ID NO: 39179 - RNA, 20 nt, Artificial Sequence
  HTT spacer sequence TTCN PAM
ccacauuuuggaaaucuguc

SEQ ID NO: 39180 - RNA, 20 nt, Artificial Sequence
  HTT spacer sequence TTCN PAM
uggauguuuaguuuauguuu

SEQ ID NO: 39181 - RNA, 20 nt, Artificial Sequence
  HTT spacer sequence TTCN PAM
aauaauccugugugggguuu

SEQ ID NO: 39182 - RNA, 20 nt, Artificial Sequence
  HTT spacer sequence TTCN PAM
gggugcgauuuucuaauaau

SEQ ID NO: 39183 - RNA, 20 nt, Artificial Sequence
  HTT spacer sequence TTCN PAM
cuuucuguuuggauuucggc

SEQ ID NO: 39184 - RNA, 20 nt, Artificial Sequence
  HTT spacer sequence TTCN PAM
agauuuuucucuuucuguuu

SEQ ID NO: 39185 - RNA, 20 nt, Artificial Sequence
  HTT spacer sequence TTCN PAM
ggcuauuuucaagauuuuuc

SEQ ID NO: 39186 - RNA, 20 nt, Artificial Sequence
  HTT spacer sequence TTCN PAM
uguaaggucauuguuucugg

SEQ ID NO: 39187 - RNA, 20 nt, Artificial Sequence
  HTT spacer sequence TTCN PAM
uuucauguaaggucauuguu

SEQ ID NO: 39188 - RNA, 20 nt, Artificial Sequence
  HTT spacer sequence TTCN PAM
ucagaaauaauaguggucag

SEQ ID NO: 39189 - RNA, 20 nt, Artificial Sequence
  HTT spacer sequence TTCN PAM
gaugaaaagucagccaaaau

SEQ ID NO: 39190 - RNA, 20 nt, Artificial Sequence
  HTT spacer sequence TTCN PAM
uucccugagccucggcggcc

SEQ ID NO: 39191 - RNA, 20 nt, Artificial Sequence
  HTT spacer sequence TTCN PAM
cugagccucggcggcccaua

SEQ ID NO: 39192 - RNA, 20 nt, Artificial Sequence
  HTT spacer sequence TTCN PAM
gccagcccagcagauugcuc

SEQ ID NO: 39193 - RNA, 20 nt, Artificial Sequence
  HTT spacer sequence TTCN PAM
cauuggccagggugagcugg

SEQ ID NO: 39194 - RNA, 20 nt, Artificial Sequence
  HTT spacer sequence TTCN PAM
gcccuccccuccagggcauc

SEQ ID NO: 39195 - RNA, 20 nt, Artificial Sequence
  HTT spacer sequence TTCN PAM
cccccacacccgcccuucag

SEQ ID NO: 39196 - RNA, 20 nt, Artificial Sequence
  HTT spacer sequence TTCN PAM
uaaugucgcccagcggggcg

SEQ ID NO: 39197 - RNA, 20 nt, Artificial Sequence
  HTT spacer sequence TTCN PAM
gugagggccggcacgguggu

SEQ ID NO: 39198 - RNA, 20 nt, Artificial Sequence
  HTT spacer sequence TTCN PAM
cagacucaagccauccuccu

SEQ ID NO: 39199 - RNA, 20 nt, Artificial Sequence
  HTT spacer sequence TTCN PAM
ucgggccgccagggccaggg

SEQ ID NO: 39200 - RNA, 20 nt, Artificial Sequence
  HTT spacer sequence TTCN PAM
guguaggaauaauauggucu

SEQ ID NO: 39201 - RNA, 20 nt, Artificial Sequence
  HTT spacer sequence TTCN PAM
uacacagaacuuccucgggc

SEQ ID NO: 39202 - RNA, 20 nt, Artificial Sequence
  HTT spacer sequence TTCN PAM
gguuaaaaacauuaugcuuc

SEQ ID NO: 39203 - RNA, 20 nt, Artificial Sequence
  HTT spacer sequence TTCN PAM
uuuaauuuauuucaucugcu

SEQ ID NO: 39204 - RNA, 20 nt, Artificial Sequence
  HTT spacer sequence TTCN PAM
ucugcucacugauggugaau

SEQ ID NO: 39205 - RNA, 20 nt, Artificial Sequence
  HTT spacer sequence TTCN PAM
ccaucagugagcagaugaaa

SEQ ID NO: 39206 - RNA, 20 nt, Artificial Sequence
  HTT spacer sequence TTCN PAM
acaacacgggcacaggaggc

SEQ ID NO: 39207 - RNA, 20 nt, Artificial Sequence
  HTT spacer sequence TTCN PAM
cuguguugcccaggcugguc

SEQ ID NO: 39208 - RNA, 20 nt, Artificial Sequence
  HTT spacer sequence TTCN PAM
aaagagcugggauuacaggc

SEQ ID NO: 39209 - RNA, 20 nt, Artificial Sequence
  HTT spacer sequence TTCN PAM
uuuguuaauuaaaaauauau

SEQ ID NO: 39210 - RNA, 20 nt, Artificial Sequence
  HTT spacer sequence TTCN PAM
uucuggcuuggcgcugcucu

SEQ ID NO: 39211 - RNA, 20 nt, Artificial Sequence
  HTT spacer sequence TTCN PAM
ggcuuggcgcugcucuggaa

SEQ ID NO: 39212 - RNA, 20 nt, Artificial Sequence
  HTT spacer sequence TTCN PAM
agagcagcgccaagccagaa

SEQ ID NO: 39213 - RNA, 20 nt, Artificial Sequence
  HTT spacer sequence TTCN PAM
accaucugcgcauaggcagg

SEQ ID NO: 39214 - RNA, 20 nt, Artificial Sequence
  HTT spacer sequence TTCN PAM
cucugucaccuaggcuggag

SEQ ID NO: 39215 - RNA, 20 nt, Artificial Sequence
  HTT spacer sequence TTCN PAM
cucccgccgcguuuuucccu

SEQ ID NO: 39216 - RNA, 20 nt, Artificial Sequence
  HTT spacer sequence TTCN PAM
ccucauucucucccgccgcg

SEQ ID NO: 39217 - RNA, 20 nt, Artificial Sequence
  HTT spacer sequence TTCN PAM
ugccuuccccucauucucuc

SEQ ID NO: 39218 - RNA, 20 nt, Artificial Sequence
  HTT spacer sequence TTCN PAM
uuccugccuuccccucauuc

SEQ ID NO: 39219 - RNA, 20 nt, Artificial Sequence
  HTT spacer sequence TTCN PAM
ccggcgcugggucucccugc

SEQ ID NO: 39220 - RNA, 20 nt, Artificial Sequence
  HTT spacer sequence TTCN PAM
uuccccggcgcugggucucc

SEQ ID NO: 39221 - RNA, 20 nt, Artificial Sequence
  HTT spacer sequence TTCN PAM
gcccgcgccaccgcccgcgc

SEQ ID NO: 39222 - RNA, 20 nt, Artificial Sequence
  HTT spacer sequence TTCN PAM
cucgucggacuccacgagcg

SEQ ID NO: 39223 - RNA, 20 nt, Artificial Sequence
  HTT spacer sequence TTCN PAM
gcccuaacaaagcggccgcu

SEQ ID NO: 39224 - RNA, 20 nt, Artificial Sequence
  HTT spacer sequence TTCN PAM
gagacccgaacuccagacgc

SEQ ID NO: 39225 - RNA, 20 nt, Artificial Sequence
  HTT spacer sequence TTCN PAM
ggucucggaaggcagcuucu

SEQ ID NO: 39226 - RNA, 20 nt, Artificial Sequence
  HTT spacer sequence TTCN PAM
cagcaagugaccaagcaggu

SEQ ID NO: 39227 - RNA, 20 nt, Artificial Sequence
  HTT spacer sequence TTCN PAM
cugugccugaguuuccucau

SEQ ID NO: 39228 - RNA, 20 nt, Artificial Sequence
  HTT spacer sequence TTCN PAM
ucauuggaccugucuuugga

SEQ ID NO: 39229 - RNA, 20 nt, Artificial Sequence
  HTT spacer sequence TTCN PAM
uaaaacugcaaguccagccu

SEQ ID NO: 39230 - RNA, 20 nt, Artificial Sequence
  HTT spacer sequence TTCN PAM
uccgcccuugucuuugucaa

SEQ ID NO: 39231 - RNA, 20 nt, Artificial Sequence
  HTT spacer sequence TTCN PAM
cuccucuuugcagugccugu

SEQ ID NO: 39232 - RNA, 20 nt, Artificial Sequence
  HTT spacer sequence TTCN PAM
gcccuguuuaggaugagggu

SEQ ID NO: 39233 - RNA, 20 nt, Artificial Sequence
  HTT spacer sequence TTCN PAM
aauaaaauguaaaauggucu

SEQ ID NO: 39234 - RNA, 20 nt, Artificial Sequence
  HTT spacer sequence TTCN PAM
accaaauucaaauaaaaugu

SEQ ID NO: 39235 - RNA, 20 nt, Artificial Sequence
  HTT spacer sequence TTCN PAM
uagaaacauuucccuuccca

SEQ ID NO: 39236 - RNA, 20 nt, Artificial Sequence
  HTT spacer sequence TTCN PAM
aggaauuccaccaaauucaa

SEQ ID NO: 39237 - RNA, 20 nt, Artificial Sequence
  HTT spacer sequence TTCN PAM
cuucccaguuguaugaguuu

SEQ ID NO: 39238 - RNA, 20 nt, Artificial Sequence
  HTT spacer sequence TTCN PAM
caguuguaugaguuuccuau

SEQ ID NO: 39239 - RNA, 20 nt, Artificial Sequence
  HTT spacer sequence TTCN PAM
uauugcuguguaacaaagca

SEQ ID NO: 39240 - RNA, 20 nt, Artificial Sequence
  HTT spacer sequence TTCN PAM
gccacuaagugaguggugcu

SEQ ID NO: 39241 - RNA, 20 nt, Artificial Sequence
  HTT spacer sequence TTCN PAM
gcccaacuagggcaaauaaa

SEQ ID NO: 39242 - RNA, 20 nt, Artificial Sequence
  HTT spacer sequence TTCN PAM
uagguaucaaaagaguagga

SEQ ID NO: 39243 - RNA, 20 nt, Artificial Sequence
  HTT spacer sequence TTCN PAM
aaaucaaggaccaaaaaaaa

SEQ ID NO: 39244 - RNA, 20 nt, Artificial Sequence
  HTT spacer sequence TTCN PAM
gaauuuugaaaauguugcuu

SEQ ID NO: 39245 - RNA, 20 nt, Artificial Sequence
  HTT spacer sequence TTCN PAM
gaaaaaaucauugucuaaaa

SEQ ID NO: 39246 - RNA, 20 nt, Artificial Sequence
  HTT spacer sequence TTCN PAM
aaauuccgaaaaaaucauug

SEQ ID NO: 39247 - RNA, 20 nt, Artificial Sequence
  HTT spacer sequence TTCN PAM
aaccagacacaagacacaaa

SEQ ID NO: 39248 - RNA, 20 nt, Artificial Sequence
  HTT spacer sequence TTCN PAM
cacauccucccacgcugcua

SEQ ID NO: 39249 - RNA, 20 nt, Artificial Sequence
  HTT spacer sequence TTCN PAM
ggggauugggcccugguauc

SEQ ID NO: 39250 - RNA, 20 nt, Artificial Sequence
  HTT spacer sequence TTCN PAM
ggccccaggagccuccccgg

SEQ ID NO: 39251 - RNA, 20 nt, Artificial Sequence
  HTT spacer sequence TTCN PAM
guuugugguuuuuaaaucug

SEQ ID NO: 39252 - RNA, 20 nt, Artificial Sequence
  HTT spacer sequence TTCN PAM
cuuuuuaucucuacuugaua

SEQ ID NO: 39253 - RNA, 20 nt, Artificial Sequence
  HTT spacer sequence TTCN PAM
uaaucccugcccaagcaccu

SEQ ID NO: 39254 - RNA, 20 nt, Artificial Sequence
  HTT spacer sequence TTCN PAM
ccacuuccuaaucccugccc

SEQ ID NO: 39255 - RNA, 20 nt, Artificial Sequence
  HTT spacer sequence TTCN PAM
aacagcgauauuagcgaccc

SEQ ID NO: 39256 - RNA, 20 nt, Artificial Sequence
  HTT spacer sequence TTCN PAM
uugucacgugggcggcuucc

SEQ ID NO: 39257 - RNA, 20 nt, Artificial Sequence
  HTT spacer sequence TTCN PAM
aggugcuuuuuuggaggcuu

SEQ ID NO: 39258 - RNA, 20 nt, Artificial Sequence
  HTT spacer sequence TTCN PAM
uccuagcuccucauuuuagg

SEQ ID NO: 39259 - RNA, 20 nt, Artificial Sequence
  HTT spacer sequence TTCN PAM
uagcuccucauuuuaggcaa

SEQ ID NO: 39260 - RNA, 20 nt, Artificial Sequence
  HTT spacer sequence TTCN PAM
gcuuauaguuuaauuuuuuu

SEQ ID NO: 39261 - RNA, 20 nt, Artificial Sequence
  HTT spacer sequence TTCN PAM
ccggacaucaggaccaucuc

SEQ ID NO: 39262 - RNA, 20 nt, Artificial Sequence
  HTT spacer sequence TTCN PAM
gccgaaaucagagcaauuua

SEQ ID NO: 39263 - RNA, 20 nt, Artificial Sequence
  HTT spacer sequence TTCN PAM
gcagaauauuccccggacau

SEQ ID NO: 39264 - RNA, 20 nt, Artificial Sequence
  HTT spacer sequence TTCN PAM
ggcaauuuaaauugcucuga

SEQ ID NO: 39265 - RNA, 20 nt, Artificial Sequence
  HTT spacer sequence TTCN PAM
ccuccuucuggcaauuuaaa

SEQ ID NO: 39266 - RNA, 20 nt, Artificial Sequence
  HTT spacer sequence TTCN PAM
aaggaagacaagcugaaaca

SEQ ID NO: 39267 - RNA, 20 nt, Artificial Sequence
  HTT spacer sequence TTCN PAM
uuggaaccugugguugcccu

SEQ ID NO: 39268 - RNA, 20 nt, Artificial Sequence
  HTT spacer sequence TTCN PAM
gcuugucuuccuuggaaccu

SEQ ID NO: 39269 - RNA, 20 nt, Artificial Sequence
  HTT spacer sequence TTCN PAM
caacacaaucacuuacugua

SEQ ID NO: 39270 - RNA, 20 nt, Artificial Sequence
  HTT spacer sequence TTCN PAM
gcaagacucuuuaaagauca

SEQ ID NO: 39271 - RNA, 20 nt, Artificial Sequence
  HTT spacer sequence TTCN PAM
ccaccacucacugguauuag

SEQ ID NO: 39272 - RNA, 20 nt, Artificial Sequence
  HTT spacer sequence TTCN PAM
uuuuucuuucuuagggcacu

SEQ ID NO: 39273 - RNA, 20 nt, Artificial Sequence
  HTT spacer sequence TTCN PAM
uucuuagggcacuguuugaa

SEQ ID NO: 39274 - RNA, 20 nt, Artificial Sequence
  HTT spacer sequence TTCN PAM
uagggcacuguuugaagaag

SEQ ID NO: 39275 - RNA, 20 nt, Artificial Sequence
  HTT spacer sequence TTCN PAM
aacagugcccuaagaaagaa

SEQ ID NO: 39276 - RNA, 20 nt, Artificial Sequence
  HTT spacer sequence TTCN PAM
ucaaacagugcccuaagaaa

SEQ ID NO: 39277 - RNA, 20 nt, Artificial Sequence
  HTT spacer sequence TTCN PAM
aagaccaagagcacgucuca

SEQ ID NO: 39278 - RNA, 20 nt, Artificial Sequence
  HTT spacer sequence TTCN PAM
gaugagcuuccaagaccaag

SEQ ID NO: 39279 - RNA, 20 nt, Artificial Sequence
  HTT spacer sequence TTCN PAM
cgcuuucgggacaggcaccc

SEQ ID NO: 39280 - RNA, 20 nt, Artificial Sequence
  HTT spacer sequence TTCN PAM
ggacaggcacccugugugcu

SEQ ID NO: 39281 - RNA, 20 nt, Artificial Sequence
  HTT spacer sequence TTCN PAM
ugggccuccgagcuggagac

SEQ ID NO: 39282 - RNA, 20 nt, Artificial Sequence
  HTT spacer sequence TTCN PAM
uugacagcaaguaucugguc

SEQ ID NO: 39283 - RNA, 20 nt, Artificial Sequence
  HTT spacer sequence TTCN PAM
cguugauuucauugacagca

SEQ ID NO: 39284 - RNA, 20 nt, Artificial Sequence
  HTT spacer sequence TTCN PAM
ugagaugcuuuuuucacguu

SEQ ID NO: 39285 - RNA, 20 nt, Artificial Sequence
  HTT spacer sequence TTCN PAM
cuacaucuucaugagaugcu

SEQ ID NO: 39286 - RNA, 20 nt, Artificial Sequence
  HTT spacer sequence TTCN PAM
caauuaauuucacuacaucu

SEQ ID NO: 39287 - RNA, 20 nt, Artificial Sequence
  HTT spacer sequence TTCN PAM
cauggugauugcugaaggcg

SEQ ID NO: 39288 - RNA, 20 nt, Artificial Sequence
  HTT spacer sequence TTCN PAM
gcaaucaccaugugaaggac

SEQ ID NO: 39289 - RNA, 20 nt, Artificial Sequence
  HTT spacer sequence TTCN PAM
aauccuguuccagugaugaa

SEQ ID NO: 39290 - RNA, 20 nt, Artificial Sequence
  HTT spacer sequence TTCN PAM
aagcggccgacgccuucagc

SEQ ID NO: 39291 - RNA, 20 nt, Artificial Sequence
  HTT spacer sequence TTCN PAM
agugaugaagaagggggacu

SEQ ID NO: 39292 - RNA, 20 nt, Artificial Sequence
  HTT spacer sequence TTCN PAM
ucacuggaacaggauucgaa

SEQ ID NO: 39293 - RNA, 20 nt, Artificial Sequence
  HTT spacer sequence TTCN PAM
ucaucacuggaacaggauuc

SEQ ID NO: 39294 - RNA, 20 nt, Artificial Sequence
  HTT spacer sequence TTCN PAM
uagagucccccuucuucauc

SEQ ID NO: 39295 - RNA, 20 nt, Artificial Sequence
  HTT spacer sequence TTCN PAM
uucauagagucccccuucuu

SEQ ID NO: 39296 - RNA, 20 nt, Artificial Sequence
  HTT spacer sequence TTCN PAM
gccagccuuuuccuucauag

SEQ ID NO: 39297 - RNA, 20 nt, Artificial Sequence
  HTT spacer sequence TTCN PAM
aaagcacuagguauaaacag

SEQ ID NO: 39298 - RNA, 20 nt, Artificial Sequence
  HTT spacer sequence TTCN PAM
uccacgacucgcucugcucu

SEQ ID NO: 39299 - RNA, 20 nt, Artificial Sequence
  HTT spacer sequence TTCN PAM
accagacugcauuuccucca

SEQ ID NO: 39300 - RNA, 20 nt, Artificial Sequence
  HTT spacer sequence TTCN PAM
auaugauuuuugaaaacccg

SEQ ID NO: 39301 - RNA, 20 nt, Artificial Sequence
  HTT spacer sequence TTCN PAM
aaaaucauauugaaaauucc

SEQ ID NO: 39302 - RNA, 20 nt, Artificial Sequence
  HTT spacer sequence TTCN PAM
gagcccuugaaauugaaaca

SEQ ID NO: 39303 - RNA, 20 nt, Artificial Sequence
  HTT spacer sequence TTCN PAM
agggcucugaauugcucgca

SEQ ID NO: 39304 - RNA, 20 nt, Artificial Sequence
  HTT spacer sequence TTCN PAM
auuucaagggcucugaauug

SEQ ID NO: 39305 - RNA, 20 nt, Artificial Sequence
  HTT spacer sequence TTCN PAM
gagucggccgcaacucgauu

SEQ ID NO: 39306 - RNA, 20 nt, Artificial Sequence
  HTT spacer sequence TTCN PAM
uguccaacaucaaaucgagu

SEQ ID NO: 39307 - RNA, 20 nt, Artificial Sequence
  HTT spacer sequence TTCN PAM
aaggaggaaauaucaaaagu

SEQ ID NO: 39308 - RNA, 20 nt, Artificial Sequence
  HTT spacer sequence TTCN PAM
uccuuagaaagcauguuggg

SEQ ID NO: 39309 - RNA, 20 nt, Artificial Sequence
  HTT spacer sequence TTCN PAM
ugaugauucgguuuucagca

SEQ ID NO: 39310 - RNA, 20 nt, Artificial Sequence
  HTT spacer sequence TTCN PAM
guuuucagcauuggacuaga

SEQ ID NO: 39311 - RNA, 20 nt, Artificial Sequence
  HTT spacer sequence TTCN PAM
gcauuggacuagaaagucau

SEQ ID NO: 39312 - RNA, 20 nt, Artificial Sequence
  HTT spacer sequence TTCN PAM
aguccaaugcugaaaaccga

SEQ ID NO: 39313 - RNA, 20 nt, Artificial Sequence
  HTT spacer sequence TTCN PAM
uuccacgagcuccaaccugg

SEQ ID NO: 39314 - RNA, 20 nt, Artificial Sequence
  HTT spacer sequence TTCN PAM
acgagcuccaaccuggaguc

SEQ ID NO: 39315 - RNA, 20 nt, Artificial Sequence
  HTT spacer sequence TTCN PAM
gcucugcccgcaggcgccgc

SEQ ID NO: 39316 - RNA, 20 nt, Artificial Sequence
  HTT spacer sequence TTCN PAM
uggucaccagcgaguggauu

SEQ ID NO: 39317 - RNA, 20 nt, Artificial Sequence
  HTT spacer sequence TTCN PAM
cggccggguacucggccacg

SEQ ID NO: 39318 - RNA, 20 nt, Artificial Sequence
  HTT spacer sequence TTCN PAM
gcgccgugugcccggacgac

SEQ ID NO: 39319 - RNA, 20 nt, Artificial Sequence
  HTT spacer sequence TTCN PAM
gguugguuaccaugcagacg

SEQ ID NO: 39320 - RNA, 20 nt, Artificial Sequence
  HTT spacer sequence TTCN PAM
ucugcaugguaaccaacccg

SEQ ID NO: 39321 - RNA, 20 nt, Artificial Sequence
  HTT spacer sequence TTCN PAM
ugccacguguucauggugga

SEQ ID NO: 39322 - RNA, 20 nt, Artificial Sequence
  HTT spacer sequence TTCN PAM
ugguggacccagacuuguuu

SEQ ID NO: 39323 - RNA, 20 nt, Artificial Sequence
  HTT spacer sequence TTCN PAM
agacagccauuggugucugg

SEQ ID NO: 39324 - RNA, 20 nt, Artificial Sequence
  HTT spacer sequence TTCN PAM
cggcguccucccuccccguc

SEQ ID NO: 39325 - RNA, 20 nt, Artificial Sequence
  HTT spacer sequence TTCN PAM
ucucuguccuguaccgagac

SEQ ID NO: 39326 - RNA, 20 nt, Artificial Sequence
  HTT spacer sequence TTCN PAM
ggacggggacgccgaugccc

SEQ ID NO: 39327 - RNA, 20 nt, Artificial Sequence
  HTT spacer sequence TTCN PAM
ggugggcaucggcguccccg

SEQ ID NO: 39328 - RNA, 20 nt, Artificial Sequence
  HTT spacer sequence TTCN PAM
caaugccgcugucacuguug

SEQ ID NO: 39329 - RNA, 20 nt, Artificial Sequence
  HTT spacer sequence TTCN PAM
accaggaggagaagagcaac

SEQ ID NO: 39330 - RNA, 20 nt, Artificial Sequence
  HTT spacer sequence TTCN PAM
ccuccugguggaaguuccca

SEQ ID NO: 39331 - RNA, 20 nt, Artificial Sequence
  HTT spacer sequence TTCN PAM
guccggaccccgaagggagc

SEQ ID NO: 39332 - RNA, 20 nt, Artificial Sequence
  HTT spacer sequence TTCN PAM
ggguccggacagaagggccc

SEQ ID NO: 39333 - RNA, 20 nt, Artificial Sequence
  HTT spacer sequence TTCN PAM
gggaccuaaacaagcaccua

SEQ ID NO: 39334 - RNA, 20 nt, Artificial Sequence
  HTT spacer sequence TTCN PAM
uugaggagcucagucccccc

SEQ ID NO: 39335 - RNA, 20 nt, Artificial Sequence
  HTT spacer sequence TTCN PAM
aagaggggcaccgugggugc

SEQ ID NO: 39336 - RNA, 20 nt, Artificial Sequence
  HTT spacer sequence TTCN PAM
accagcgcuggcucccgguc

SEQ ID NO: 39337 - RNA, 20 nt, Artificial Sequence
  HTT spacer sequence TTCN PAM
accgauggcugguccagcau

SEQ ID NO: 39338 - RNA, 20 nt, Artificial Sequence
  HTT spacer sequence TTCN PAM
cgcagcccccgcugaaugcc

SEQ ID NO: 39339 - RNA, 20 nt, Artificial Sequence
  HTT spacer sequence TTCN PAM
gcgggggcugcgcgaagcug

SEQ ID NO: 39340 - RNA, 20 nt, Artificial Sequence
  HTT spacer sequence TTCN PAM
gggcauucagcgggggcugc

SEQ ID NO: 39341 - RNA, 20 nt, Artificial Sequence
  HTT spacer sequence TTCN PAM
uggaccacucccucuucggg

SEQ ID NO: 39342 - RNA, 20 nt, Artificial Sequence
  HTT spacer sequence TTCN PAM
aaaggccuuccuggaccacu

SEQ ID NO: 39343 - RNA, 20 nt, Artificial Sequence
  HTT spacer sequence TTCN PAM
auggggaccaaaaaugcuuu

SEQ ID NO: 39344 - RNA, 20 nt, Artificial Sequence
  HTT spacer sequence TTCN PAM
aaagacuaaggaagauaaaa

SEQ ID NO: 39345 - RNA, 20 nt, Artificial Sequence
  HTT spacer sequence TTCN PAM
aacauuucgauggggaccaa

SEQ ID NO: 39346 - RNA, 20 nt, Artificial Sequence
  HTT spacer sequence TTCN PAM
uuagucuuucgaacauuucg

SEQ ID NO: 39347 - RNA, 20 nt, Artificial Sequence
  HTT spacer sequence TTCN PAM
cugcacccaaccgcacaggc

SEQ ID NO: 39348 - RNA, 20 nt, Artificial Sequence
  HTT spacer sequence TTCN PAM
agaggguucccugcacccaa

SEQ ID NO: 39349 - RNA, 20 nt, Artificial Sequence
  HTT spacer sequence TTCN PAM
cauccugagaccauccuaag

SEQ ID NO: 39350 - RNA, 20 nt, Artificial Sequence
  HTT spacer sequence TTCN PAM
uaggauggucucaggaugug

SEQ ID NO: 39351 - RNA, 20 nt, Artificial Sequence
  HTT spacer sequence TTCN PAM
gcugcucuaacuggggaggc

SEQ ID NO: 39352 - RNA, 20 nt, Artificial Sequence
  HTT spacer sequence TTCN PAM
aggggucaugaggcggccac

SEQ ID NO: 39353 - RNA, 20 nt, Artificial Sequence
  HTT spacer sequence TTCN PAM
cccuccucuggggaggagca

SEQ ID NO: 39354 - RNA, 20 nt, Artificial Sequence
  HTT spacer sequence TTCN PAM
uugcuccuccccagaggagg

SEQ ID NO: 39355 - RNA, 20 nt, Artificial Sequence
  HTT spacer sequence TTCN PAM
uaaaauuuccauacaaugga

SEQ ID NO: 39356 - RNA, 20 nt, Artificial Sequence
  HTT spacer sequence TTCN PAM
auacaauggauuuuggaaau

SEQ ID NO: 39357 - RNA, 20 nt, Artificial Sequence
  HTT spacer sequence TTCN PAM
aaaauccauuguauggaaau

SEQ ID NO: 39358 - RNA, 20 nt, Artificial Sequence
  HTT spacer sequence TTCN PAM
uuuuuaaaauuuccaaaauc

SEQ ID NO: 39359 - RNA, 20 nt, Artificial Sequence
  HTT spacer sequence TTCN PAM
aaauuacaccaaucaauccu

SEQ ID NO: 39360 - RNA, 20 nt, Artificial Sequence
  HTT spacer sequence TTCN PAM
uuucaaaauuacaccaauca

SEQ ID NO: 39361 - RNA, 20 nt, Artificial Sequence
  HTT spacer sequence TTCN PAM
uucauuucaaaauuacacca

SEQ ID NO: 39362 - RNA, 20 nt, Artificial Sequence
  HTT spacer sequence TTCN PAM
uacugaaucaguccccaguu

SEQ ID NO: 39363 - RNA, 20 nt, Artificial Sequence
  HTT spacer sequence TTCN PAM
guaagaaauggcacaggcau

SEQ ID NO: 39364 - RNA, 20 nt, Artificial Sequence
  HTT spacer sequence TTCN PAM
auauuuaauaauaagcugga

SEQ ID NO: 39365 - RNA, 20 nt, Artificial Sequence
  HTT spacer sequence TTCN PAM
acaucuaggaaccuacccaa

SEQ ID NO: 39366 - RNA, 20 nt, Artificial Sequence
  HTT spacer sequence TTCN PAM
aguuuauauuuuugucagua

SEQ ID NO: 39367 - RNA, 20 nt, Artificial Sequence
  HTT spacer sequence TTCN PAM
cucucucucucucucucucu

SEQ ID NO: 39368 - RNA, 20 nt, Artificial Sequence
  HTT spacer sequence TTCN PAM
auaaaaaagggggcauucuc

SEQ ID NO: 39369 - RNA, 20 nt, Artificial Sequence
  HTT spacer sequence TTCN PAM
ccuucaauaaaaaagggggc

SEQ ID NO: 39370 - RNA, 20 nt, Artificial Sequence
  HTT spacer sequence TTCN PAM
guacaucaaaauaacacaaa

SEQ ID NO: 39371 - RNA, 20 nt, Artificial Sequence
  HTT spacer sequence TTCN PAM
uuucacccaguuuauuggca

SEQ ID NO: 39372 - RNA, 20 nt, Artificial Sequence
  HTT spacer sequence TTCN PAM
cccaguuuauuggcagguuc

SEQ ID NO: 39373 - RNA, 20 nt, Artificial Sequence
  HTT spacer sequence TTCN PAM
guggccuuugccuuuuccag

SEQ ID NO: 39374 - RNA, 20 nt, Artificial Sequence
  HTT spacer sequence TTCN PAM
agcuuggcaacgugagccac

SEQ ID NO: 39375 - RNA, 20 nt, Artificial Sequence
  HTT spacer sequence TTCN PAM
cagcgauggcagaucuuguc

SEQ ID NO: 39376 - RNA, 20 nt, Artificial Sequence
  HTT spacer sequence TTCN PAM
accagcuuagagcucccuug

SEQ ID NO: 39377 - RNA, 20 nt, Artificial Sequence
  HTT spacer sequence TTCN PAM
aaguuaaccugugugaaggc

SEQ ID NO: 39378 - RNA, 20 nt, Artificial Sequence
  HTT spacer sequence TTCN PAM
cacagguuaacuuggaagac

SEQ ID NO: 39379 - RNA, 20 nt, Artificial Sequence
  HTT spacer sequence TTCN PAM
cuugacagugcggucgggaa

SEQ ID NO: 39380 - RNA, 20 nt, Artificial Sequence
  HTT spacer sequence TTCN PAM
cgaccgcacugucaagggaa

SEQ ID NO: 39381 - RNA, 20 nt, Artificial Sequence
  HTT spacer sequence TTCN PAM
ugccugccugcguccugaga

SEQ ID NO: 39382 - RNA, 20 nt, Artificial Sequence
  HTT spacer sequence TTCN PAM
cguucuccaccaagguugug

SEQ ID NO: 39383 - RNA, 20 nt, Artificial Sequence
  HTT spacer sequence TTCN PAM
ccaccaagguugugacagua

SEQ ID NO: 39384 - RNA, 20 nt, Artificial Sequence
  HTT spacer sequence TTCN PAM
agcagggguugauacuguca

SEQ ID NO: 39385 - RNA, 20 nt, Artificial Sequence
  HTT spacer sequence TTCN PAM
ucucuugcuugucucugguu

SEQ ID NO: 39386 - RNA, 20 nt, Artificial Sequence
  HTT spacer sequence TTCN PAM
cuugcuugucucugguuggu

SEQ ID NO: 39387 - RNA, 20 nt, Artificial Sequence
  HTT spacer sequence TTCN PAM
cccaggccucaggccacagg

SEQ ID NO: 39388 - RNA, 20 nt, Artificial Sequence
  HTT spacer sequence TTCN PAM
gccauucauggaggauggcc

SEQ ID NO: 39389 - RNA, 20 nt, Artificial Sequence
  HTT spacer sequence TTCN PAM
uggaggauggcccuuugcca

SEQ ID NO: 39390 - RNA, 20 nt, Artificial Sequence
  HTT spacer sequence TTCN PAM
gcaguggacaggacguccag

SEQ ID NO: 39391 - RNA, 20 nt, Artificial Sequence
  HTT spacer sequence TTCN PAM
uagggcuuuccucagacguc

SEQ ID NO: 39392 - RNA, 20 nt, Artificial Sequence
  HTT spacer sequence TTCN PAM
ucagacguccaucuucuugg

SEQ ID NO: 39393 - RNA, 20 nt, Artificial Sequence
  HTT spacer sequence TTCN PAM
uggccaucugcugcugcaug

SEQ ID NO: 39394 - RNA, 20 nt, Artificial Sequence
  HTT spacer sequence TTCN PAM
cuuuggccuucuucccuuuc

SEQ ID NO: 39395 - RNA, 20 nt, Artificial Sequence
  HTT spacer sequence TTCN PAM
ucccuuucagcaucuuaggu

SEQ ID NO: 39396 - RNA, 20 nt, Artificial Sequence
  HTT spacer sequence TTCN PAM
cuuucagcaucuuagguagc

SEQ ID NO: 39397 - RNA, 20 nt, Artificial Sequence
  HTT spacer sequence TTCN PAM
gcaucuuagguagcuggaga

SEQ ID NO: 39398 - RNA, 20 nt, Artificial Sequence
  HTT spacer sequence TTCN PAM
ccagcuaccuaagaugcuga

SEQ ID NO: 39399 - RNA, 20 nt, Artificial Sequence
  HTT spacer sequence TTCN PAM
uccuacccauguagcucugg

SEQ ID NO: 39400 - RNA, 20 nt, Artificial Sequence
  HTT spacer sequence TTCN PAM
uacccauguagcucuggagu

SEQ ID NO: 39401 - RNA, 20 nt, Artificial Sequence
  HTT spacer sequence TTCN PAM
ccuuuggcagauuuuuuuau

SEQ ID NO: 39402 - RNA, 20 nt, Artificial Sequence
  HTT spacer sequence TTCN PAM
auuuuuccccuuuggcagau

SEQ ID NO: 39403 - RNA, 20 nt, Artificial Sequence
  HTT spacer sequence TTCN PAM
uuuucaauuuuuccccuuug

SEQ ID NO: 39404 - RNA, 20 nt, Artificial Sequence
  HTT spacer sequence TTCN PAM
uucauuuucaauuuuucccc

SEQ ID NO: 39405 - RNA, 20 nt, Artificial Sequence
  HTT spacer sequence TTCN PAM
cacucucuauuugaccucca

SEQ ID NO: 39406 - RNA, 20 nt, Artificial Sequence
  HTT spacer sequence TTCN PAM
ugggaggaguuuucugaaag

SEQ ID NO: 39407 - RNA, 20 nt, Artificial Sequence
  HTT spacer sequence TTCN PAM
gaaaggugauuuaugcaugc

SEQ ID NO: 39408 - RNA, 20 nt, Artificial Sequence
  HTT spacer sequence TTCN PAM
gaaaacuccucccaagaaaa

SEQ ID NO: 39409 - RNA, 20 nt, Artificial Sequence
  HTT spacer sequence TTCN PAM
uugguucaggaaugcggcuu

SEQ ID NO: 39410 - RNA, 20 nt, Artificial Sequence
  HTT spacer sequence TTCN PAM
ggaaugcggcuuaaguuuua

SEQ ID NO: 39411 - RNA, 20 nt, Artificial Sequence
  HTT spacer sequence TTCN PAM
ugaaccaaggaauccuaucc

SEQ ID NO: 39412 - RNA, 20 nt, Artificial Sequence
  HTT spacer sequence TTCN PAM
uaucaaacaaaucaaaauaa

SEQ ID NO: 39413 - RNA, 20 nt, Artificial Sequence
  HTT spacer sequence TTCN PAM
acauaugcaaaucaauaaau

SEQ ID NO: 39414 - RNA, 20 nt, Artificial Sequence
  HTT spacer sequence TTCN PAM
acauaguacuggaaguccua

SEQ ID NO: 39415 - RNA, 20 nt, Artificial Sequence
  HTT spacer sequence TTCN PAM
aguacuauguugaauaggag

SEQ ID NO: 39416 - RNA, 20 nt, Artificial Sequence
  HTT spacer sequence TTCN PAM
ucuugccugacugcucuggc

SEQ ID NO: 39417 - RNA, 20 nt, Artificial Sequence
  HTT spacer sequence TTCN PAM
cuaauugguaugccuuuuau

SEQ ID NO: 39418 - RNA, 20 nt, Artificial Sequence
  HTT spacer sequence TTCN PAM
uuauaccaauaaugaucuag

SEQ ID NO: 39419 - RNA, 20 nt, Artificial Sequence
  HTT spacer sequence TTCN PAM
cagcuagaucauuauuggua

SEQ ID NO: 39420 - RNA, 20 nt, Artificial Sequence
  HTT spacer sequence TTCN PAM
uucucagcuagaucauuauu

SEQ ID NO: 39421 - RNA, 20 nt, Artificial Sequence
  HTT spacer sequence TTCN PAM
uugauuucuuucucagcuag

SEQ ID NO: 39422 - RNA, 20 nt, Artificial Sequence
  HTT spacer sequence TTCN PAM
gacaguauggucacuuuaau

SEQ ID NO: 39423 - RNA, 20 nt, Artificial Sequence
  HTT spacer sequence TTCN PAM
auguaaucccuaccaaaaua

SEQ ID NO: 39424 - RNA, 20 nt, Artificial Sequence
  HTT spacer sequence TTCN PAM
cggaaguagaaaacgcaauc

SEQ ID NO: 39425 - RNA, 20 nt, Artificial Sequence
  HTT spacer sequence TTCN PAM
gugaaaaauuacguagguau

SEQ ID NO: 39426 - RNA, 20 nt, Artificial Sequence
  HTT spacer sequence TTCN PAM
acuuccgugaaaaauuacgu

SEQ ID NO: 39427 - RNA, 20 nt, Artificial Sequence
  HTT spacer sequence TTCN PAM
auauaaauuuuaggauugcg

SEQ ID NO: 39428 - RNA, 20 nt, Artificial Sequence
  HTT spacer sequence TTCN PAM
ggcucuuuuuugguuccaua

SEQ ID NO: 39429 - RNA, 20 nt, Artificial Sequence
  HTT spacer sequence TTCN PAM
aagcaaaaagaacaaagcug

SEQ ID NO: 39430 - RNA, 20 nt, Artificial Sequence
  HTT spacer sequence TTCN PAM
uuuugcuuagaauugcuuug

SEQ ID NO: 39431 - RNA, 20 nt, Artificial Sequence
  HTT spacer sequence TTCN PAM
aauuauacaaggcuguagua

SEQ ID NO: 39432 - RNA, 20 nt, Artificial Sequence
  HTT spacer sequence TTCN PAM
cuauuuuguugucuaguuuu

SEQ ID NO: 39433 - RNA, 20 nt, Artificial Sequence
  HTT spacer sequence TTCN PAM
ggguucucuauuuuguuguc

SEQ ID NO: 39434 - RNA, 20 nt, Artificial Sequence
  HTT spacer sequence TTCN PAM
ucccccuugucuacuaacca

SEQ ID NO: 39435 - RNA, 20 nt, Artificial Sequence
  HTT spacer sequence TTCN PAM
ccuuggaguuaaaggugacc

SEQ ID NO: 39436 - RNA, 20 nt, Artificial Sequence
  HTT spacer sequence TTCN PAM
caacaacagcaccuagaaca

SEQ ID NO: 39437 - RNA, 20 nt, Artificial Sequence
  HTT spacer sequence TTCN PAM
aggugcuguuguugcgaaca

SEQ ID NO: 39438 - RNA, 20 nt, Artificial Sequence
  HTT spacer sequence TTCN PAM
aacugccaggcacuguucua

SEQ ID NO: 39439 - RNA, 20 nt, Artificial Sequence
  HTT spacer sequence TTCN PAM
aucaaaaaaaauauuaagug

SEQ ID NO: 39440 - RNA, 20 nt, Artificial Sequence
  HTT spacer sequence TTCN PAM
uucaaucaaaaaaaauauua

SEQ ID NO: 39441 - RNA, 20 nt, Artificial Sequence
  HTT spacer sequence TTCN PAM
uauucccaucauaagaaguu

SEQ ID NO: 39442 - RNA, 20 nt, Artificial Sequence
  HTT spacer sequence TTCN PAM
uuugaaggaaaaguaaaaau

SEQ ID NO: 39443 - RNA, 20 nt, Artificial Sequence
  HTT spacer sequence TTCN PAM
aaggaaguuuuuuuuuagua

SEQ ID NO: 39444 - RNA, 20 nt, Artificial Sequence
  HTT spacer sequence TTCN PAM
uucaaaggaaguuuuuuuuu

SEQ ID NO: 39445 - RNA, 20 nt, Artificial Sequence
  HTT spacer sequence TTCN PAM
uauuaaaauaauuuuuuaaa

SEQ ID NO: 39446 - RNA, 20 nt, Artificial Sequence
  HTT spacer sequence TTCN PAM
gcacauagauuuuacgcugc

SEQ ID NO: 39447 - RNA, 20 nt, Artificial Sequence
  HTT spacer sequence TTCN PAM
aguacaaugagaggaaguuu

SEQ ID NO: 39448 - RNA, 20 nt, Artificial Sequence
  HTT spacer sequence TTCN PAM
ucucauuguacuggaaaagc

SEQ ID NO: 39449 - RNA, 20 nt, Artificial Sequence
  HTT spacer sequence TTCN PAM
aaauagauuguaaaaaaaaa

SEQ ID NO: 39450 - RNA, 20 nt, Artificial Sequence
  HTT spacer sequence TTCN PAM
aaaagggucacagcucaggc

SEQ ID NO: 39451 - RNA, 20 nt, Artificial Sequence
  HTT spacer sequence TTCN PAM
cccuuuuuccccuuaaaguu

SEQ ID NO: 39452 - RNA, 20 nt, Artificial Sequence
  HTT spacer sequence TTCN PAM
accugaggaagcugguugaa

SEQ ID NO: 39453 - RNA, 20 nt, Artificial Sequence
  HTT spacer sequence TTCN PAM
ucagguugaagcauuuacaa

SEQ ID NO: 39454 - RNA, 20 nt, Artificial Sequence
  HTT spacer sequence TTCN PAM
accagcuuccucagguugaa

SEQ ID NO: 39455 - RNA, 20 nt, Artificial Sequence
  HTT spacer sequence TTCN PAM
uugagaucauguuucugccu

SEQ ID NO: 39456 - RNA, 20 nt, Artificial Sequence
  HTT spacer sequence TTCN PAM
gccuuuugaugcuaacaugg

SEQ ID NO: 39457 - RNA, 20 nt, Artificial Sequence
  HTT spacer sequence TTCN PAM
aauaauagaccauacuugca

SEQ ID NO: 39458 - RNA, 20 nt, Artificial Sequence
  HTT spacer sequence TTCN PAM
ugagauaaaccuaacuuaug

SEQ ID NO: 39459 - RNA, 20 nt, Artificial Sequence
  HTT spacer sequence TTCN PAM
accauuaauuuuuuguuuug

SEQ ID NO: 39460 - RNA, 20 nt, Artificial Sequence
  HTT spacer sequence TTCN PAM
auuccucuuccuucucuuuu

SEQ ID NO: 39461 - RNA, 20 nt, Artificial Sequence
  HTT spacer sequence TTCN PAM
ucuuccuucucuuuucccuc

SEQ ID NO: 39462 - RNA, 20 nt, Artificial Sequence
  HTT spacer sequence TTCN PAM
uucucuuuucccucccuuuc

SEQ ID NO: 39463 - RNA, 20 nt, Artificial Sequence
  HTT spacer sequence TTCN PAM
cuuuucccucccuuucuucu

SEQ ID NO: 39464 - RNA, 20 nt, Artificial Sequence
  HTT spacer sequence TTCN PAM
cucccuuucuucuccuuuuc

SEQ ID NO: 39465 - RNA, 20 nt, Artificial Sequence
  HTT spacer sequence TTCN PAM
ucuccuuuuccucguauauu

SEQ ID NO: 39466 - RNA, 20 nt, Artificial Sequence
  HTT spacer sequence TTCN PAM
ccuuuuccucguauauugaa

SEQ ID NO: 39467 - RNA, 20 nt, Artificial Sequence
  HTT spacer sequence TTCN PAM
ucguauauugaaucuuauau

SEQ ID NO: 39468 - RNA, 20 nt, Artificial Sequence
  HTT spacer sequence TTCN PAM
auauacgaggaaaaggagaa

SEQ ID NO: 39469 - RNA, 20 nt, Artificial Sequence
  HTT spacer sequence TTCN PAM
auaacuuuuuauuuaaaaau

SEQ ID NO: 39470 - RNA, 20 nt, Artificial Sequence
  HTT spacer sequence TTCN PAM
auuucuguuuucgaauuguu

SEQ ID NO: 39471 - RNA, 20 nt, Artificial Sequence
  HTT spacer sequence TTCN PAM
guuuucgaauuguuacuaua

SEQ ID NO: 39472 - RNA, 20 nt, Artificial Sequence
  HTT spacer sequence TTCN PAM
aauuguuacuauaaguggca

SEQ ID NO: 39473 - RNA, 20 nt, Artificial Sequence
  HTT spacer sequence TTCN PAM
aaaacagaaauggaaaaguu

SEQ ID NO: 39474 - RNA, 20 nt, Artificial Sequence
  HTT spacer sequence TTCN PAM
gacagcucaagaagaagauc

SEQ ID NO: 39475 - RNA, 20 nt, Artificial Sequence
  HTT spacer sequence TTCN PAM
ugagcugucagaacaaucug

SEQ ID NO: 39476 - RNA, 20 nt, Artificial Sequence
  HTT spacer sequence TTCN PAM
ucuugagcugucagaacaau

SEQ ID NO: 39477 - RNA, 20 nt, Artificial Sequence
  HTT spacer sequence TTCN PAM
uccugugaauccacuuuuuc

SEQ ID NO: 39478 - RNA, 20 nt, Artificial Sequence
  HTT spacer sequence TTCN PAM
ugugaauccacuuuuucuag

SEQ ID NO: 39479 - RNA, 20 nt, Artificial Sequence
  HTT spacer sequence TTCN PAM
caggaagaaugcaguaauau

SEQ ID NO: 39480 - RNA, 20 nt, Artificial Sequence
  HTT spacer sequence TTCN PAM
agguucucccucccugcuuu

SEQ ID NO: 39481 - RNA, 20 nt, Artificial Sequence
  HTT spacer sequence TTCN PAM
cccucccugcuuucuugccu

SEQ ID NO: 39482 - RNA, 20 nt, Artificial Sequence
  HTT spacer sequence TTCN PAM
ugccuuauguuuuguuuugu

SEQ ID NO: 39483 - RNA, 20 nt, Artificial Sequence
  HTT spacer sequence TTCN PAM
agccugguugguuuauuucc

SEQ ID NO: 39484 - RNA, 20 nt, Artificial Sequence
  HTT spacer sequence TTCN PAM
uuaguccacacccaccuccu

SEQ ID NO: 39485 - RNA, 20 nt, Artificial Sequence
  HTT spacer sequence TTCN PAM
aaaauaucuuagggccuaug

SEQ ID NO: 39486 - RNA, 20 nt, Artificial Sequence
  HTT spacer sequence TTCN PAM
uguguaauauucaucuuuuu

SEQ ID NO: 39487 - RNA, 20 nt, Artificial Sequence
  HTT spacer sequence TTCN PAM
aacauaaaacuagacaaacu

SEQ ID NO: 39488 - RNA, 20 nt, Artificial Sequence
  HTT spacer sequence TTCN PAM
auuucaaacauaaaacuaga

SEQ ID NO: 39489 - RNA, 20 nt, Artificial Sequence
  HTT spacer sequence TTCN PAM
aaaauaguuuugcuuuuggg

SEQ ID NO: 39490 - RNA, 20 nt, Artificial Sequence
  HTT spacer sequence TTCN PAM
aagcccaaaagcaaaacuau

SEQ ID NO: 39491 - RNA, 20 nt, Artificial Sequence
  HTT spacer sequence TTCN PAM
uccugccgcacagaguuuug

SEQ ID NO: 39492 - RNA, 20 nt, Artificial Sequence
  HTT spacer sequence TTCN PAM
ugccgcacagaguuuuguaa

SEQ ID NO: 39493 - RNA, 20 nt, Artificial Sequence
  HTT spacer sequence TTCN PAM
ugugauauuauuuagauugc

SEQ ID NO: 39494 - RNA, 20 nt, Artificial Sequence
  HTT spacer sequence TTCN PAM
augcccgcaauaaaucaucc

SEQ ID NO: 39495 - RNA, 20 nt, Artificial Sequence
  HTT spacer sequence TTCN PAM
uuccaugcccgcaauaaauc

SEQ ID NO: 39496 - RNA, 20 nt, Artificial Sequence
  HTT spacer sequence TTCN PAM
aaaauguguaugucagcauc

SEQ ID NO: 39497 - RNA, 20 nt, Artificial Sequence
  HTT spacer sequence TTCN PAM
ugcggcugagggccaagggc

SEQ ID NO: 39498 - RNA, 20 nt, Artificial Sequence
  HTT spacer sequence TTCN PAM
ggggugugugcucuuucccc

SEQ ID NO: 39499 - RNA, 20 nt, Artificial Sequence
  HTT spacer sequence TTCN PAM
ccuuccuggccaaugagagg

SEQ ID NO: 39500 - RNA, 20 nt, Artificial Sequence
  HTT spacer sequence TTCN PAM
uggccaaugagaggacagug

SEQ ID NO: 39501 - RNA, 20 nt, Artificial Sequence
  HTT spacer sequence TTCN PAM
cuguccucucauuggccagg

SEQ ID NO: 39502 - RNA, 20 nt, Artificial Sequence
  HTT spacer sequence TTCN PAM
cuacugggaaguggguuggg

SEQ ID NO: 39503 - RNA, 20 nt, Artificial Sequence
  HTT spacer sequence TTCN PAM
caguagugaaaacacacagc

SEQ ID NO: 39504 - RNA, 20 nt, Artificial Sequence
  HTT spacer sequence TTCN PAM
gaggguccugccccccaacc

SEQ ID NO: 39505 - RNA, 20 nt, Artificial Sequence
  HTT spacer sequence TTCN PAM
gcacauccugucugaccacc

SEQ ID NO: 39506 - RNA, 20 nt, Artificial Sequence
  HTT spacer sequence TTCN PAM
aguggguguaccgcucgugu

SEQ ID NO: 39507 - RNA, 20 nt, Artificial Sequence
  HTT spacer sequence TTCN PAM
agcugcugccccuaccgugu

SEQ ID NO: 39508 - RNA, 20 nt, Artificial Sequence
  HTT spacer sequence TTCN PAM
uugguccccucccccuuggg

SEQ ID NO: 39509 - RNA, 20 nt, Artificial Sequence
  HTT spacer sequence TTCN PAM
ucugggccucacuuguuugg

SEQ ID NO: 39510 - RNA, 20 nt, Artificial Sequence
  HTT spacer sequence TTCN PAM
cgggaguggccaggagguac

SEQ ID NO: 39511 - RNA, 20 nt, Artificial Sequence
  HTT spacer sequence TTCN PAM
cguucgcuccccuggcccug

SEQ ID NO: 39512 - RNA, 20 nt, Artificial Sequence
  HTT spacer sequence TTCN PAM
cuccccuggcccuggcagcc

SEQ ID NO: 39513 - RNA, 20 nt, Artificial Sequence
  HTT spacer sequence TTCN PAM
guccuccucucugccaaggc

SEQ ID NO: 39514 - RNA, 20 nt, Artificial Sequence
  HTT spacer sequence TTCN PAM
ugcggggaccucccagacgg

SEQ ID NO: 39515 - RNA, 20 nt, Artificial Sequence
  HTT spacer sequence TTCN PAM
ugccuagauagcagcagagu

SEQ ID NO: 39516 - RNA, 20 nt, Artificial Sequence
  HTT spacer sequence TTCN PAM
gcucacccccucucacuucc

SEQ ID NO: 39517 - RNA, 20 nt, Artificial Sequence
  HTT spacer sequence TTCN PAM
uggcauccguguccccuggu

SEQ ID NO: 39518 - RNA, 20 nt, Artificial Sequence
  HTT spacer sequence TTCN PAM
gauuccucuccuuccugggc

SEQ ID NO: 39519 - RNA, 20 nt, Artificial Sequence
  HTT spacer sequence TTCN PAM
ucuccuuccugggcugaguc

SEQ ID NO: 39520 - RNA, 20 nt, Artificial Sequence
  HTT spacer sequence TTCN PAM
ugggcugaguccugggcuug

SEQ ID NO: 39521 - RNA, 20 nt, Artificial Sequence
  HTT spacer sequence TTCN PAM
ugccagugcagugccagguc

SEQ ID NO: 39522 - RNA, 20 nt, Artificial Sequence
  HTT spacer sequence TTCN PAM
uguucuuuucggcuuccucc

SEQ ID NO: 39523 - RNA, 20 nt, Artificial Sequence
  HTT spacer sequence TTCN PAM
uuucggcuuccuccuggcuc

SEQ ID NO: 39524 - RNA, 20 nt, Artificial Sequence
  HTT spacer sequence TTCN PAM
gcuuccuccuggcucagcug

SEQ ID NO: 39525 - RNA, 20 nt, Artificial Sequence
  HTT spacer sequence TTCN PAM
uccuggcucagcugacuguc

SEQ ID NO: 39526 - RNA, 20 nt, Artificial Sequence
  HTT spacer sequence TTCN PAM
cggccuccuccuggucacgc

SEQ ID NO: 39527 - RNA, 20 nt, Artificial Sequence
  HTT spacer sequence TTCN PAM
gguaccgccugccaccccuc

SEQ ID NO: 39528 - RNA, 20 nt, Artificial Sequence
  HTT spacer sequence TTCN PAM
uaacuugacuugucuguucu

SEQ ID NO: 39529 - RNA, 20 nt, Artificial Sequence
  HTT spacer sequence TTCN PAM
ugucccuggugccuuuaagc

SEQ ID NO: 39530 - RNA, 20 nt, Artificial Sequence
  HTT spacer sequence TTCN PAM
acuguuccaagccccuuccu

SEQ ID NO: 39531 - RNA, 20 nt, Artificial Sequence
  HTT spacer sequence TTCN PAM
aagccccuuccucggaggcg

SEQ ID NO: 39532 - RNA, 20 nt, Artificial Sequence
  HTT spacer sequence TTCN PAM
ucggaggcgucuccccaacc

SEQ ID NO: 39533 - RNA, 20 nt, Artificial Sequence
  HTT spacer sequence TTCN PAM
acuccugugggagggcagug

SEQ ID NO: 39534 - RNA, 20 nt, Artificial Sequence
  HTT spacer sequence TTCN PAM
guagcaucaugcccuguaag

SEQ ID NO: 39535 - RNA, 20 nt, Artificial Sequence
  HTT spacer sequence TTCN PAM
caaacuucaguagcaucaug

SEQ ID NO: 39536 - RNA, 20 nt, Artificial Sequence
  HTT spacer sequence TTCN PAM
uugacgcuguuacuaagacu

SEQ ID NO: 39537 - RNA, 20 nt, Artificial Sequence
  HTT spacer sequence TTCN PAM
uuucacaugaaaaggaugac

SEQ ID NO: 39538 - RNA, 20 nt, Artificial Sequence
  HTT spacer sequence TTCN PAM
caugaaaaggaugacuuccu

SEQ ID NO: 39539 - RNA, 20 nt, Artificial Sequence
  HTT spacer sequence TTCN PAM
ugugaaaagaacagauccca

SEQ ID NO: 39540 - RNA, 20 nt, Artificial Sequence
  HTT spacer sequence TTCN PAM
ucuuguugggugucaccuag

SEQ ID NO: 39541 - RNA, 20 nt, Artificial Sequence
  HTT spacer sequence TTCN PAM
cgggacaccuccaccuggag

SEQ ID NO: 39542 - RNA, 20 nt, Artificial Sequence
  HTT spacer sequence TTCN PAM
cagaggcacucuccaggugg

SEQ ID NO: 39543 - RNA, 20 nt, Artificial Sequence
  HTT spacer sequence TTCN PAM
ucagauggacuuuucguuuc

SEQ ID NO: 39544 - RNA, 20 nt, Artificial Sequence
  HTT spacer sequence TTCN PAM
uuuccuggaguuuugucaug

SEQ ID NO: 39545 - RNA, 20 nt, Artificial Sequence
  HTT spacer sequence TTCN PAM
uggaguuuugucaugaggcu

SEQ ID NO: 39546 - RNA, 20 nt, Artificial Sequence
  HTT spacer sequence TTCN PAM
uucagucugcaacugugucu

SEQ ID NO: 39547 - RNA, 20 nt, Artificial Sequence
  HTT spacer sequence TTCN PAM
gucugcaacugugucugaug

SEQ ID NO: 39548 - RNA, 20 nt, Artificial Sequence
  HTT spacer sequence TTCN PAM
gauguauauauuuuuuauuu

SEQ ID NO: 39549 - RNA, 20 nt, Artificial Sequence
  HTT spacer sequence TTCN PAM
uaaaguuuucaaauugugaa

SEQ ID NO: 39550 - RNA, 20 nt, Artificial Sequence
  HTT spacer sequence TTCN PAM
aauugugaaaguguauuugc

SEQ ID NO: 39551 - RNA, 20 nt, Artificial Sequence
  HTT spacer sequence TTCN PAM
caauuugaaaacuuuaugaa

SEQ ID NO: 39552 - RNA, 20 nt, Artificial Sequence
  HTT spacer sequence TTCN PAM
ugagggcaucaaauggcaaa

SEQ ID NO: 39553 - RNA, 20 nt, Artificial Sequence
  HTT spacer sequence TTCN PAM
cugucuccuugugggcgggu

SEQ ID NO: 39554 - RNA, 20 nt, Artificial Sequence
  HTT spacer sequence TTCN PAM
aggugaguuaauucuggggg

SEQ ID NO: 39555 - RNA, 20 nt, Artificial Sequence
  HTT spacer sequence TTCN PAM
gggggcgcuuucugugacac

SEQ ID NO: 39556 - RNA, 20 nt, Artificial Sequence
  HTT spacer sequence TTCN PAM
gugacacccagguggccucg

SEQ ID NO: 39557 - RNA, 20 nt, Artificial Sequence
  HTT spacer sequence TTCN PAM
aaaacacacgccgaggccac

SEQ ID NO: 39558 - RNA, 20 nt, Artificial Sequence
  HTT spacer sequence TTCN PAM
cuuaacaaacagcuuccaaa

SEQ ID NO: 39559 - RNA, 20 nt, Artificial Sequence
  HTT spacer sequence TTCN PAM
gggccauggcaguucucuua

SEQ ID NO: 39560 - RNA, 20 nt, Artificial Sequence
  HTT spacer sequence TTCN PAM
cuuguuguauaaccagcuuu

SEQ ID NO: 39561 - RNA, 20 nt, Artificial Sequence
  HTT spacer sequence TTCN PAM
aagugcuuucugaauuugag

SEQ ID NO: 39562 - RNA, 20 nt, Artificial Sequence
  HTT spacer sequence TTCN PAM
gaauuugagcaauucaggaa

SEQ ID NO: 39563 - RNA, 20 nt, Artificial Sequence
  HTT spacer sequence TTCN PAM
gaaagcacuuugaaaucuua

SEQ ID NO: 39564 - RNA, 20 nt, Artificial Sequence
  HTT spacer sequence TTCN PAM
ggaaauuugggugagaccca

SEQ ID NO: 39565 - RNA, 20 nt, Artificial Sequence
  HTT spacer sequence TTCN PAM
ugaauugcucaaauucagaa

SEQ ID NO: 39566 - RNA, 20 nt, Artificial Sequence
  HTT spacer sequence TTCN PAM
gggucucacccaaauuuccu

SEQ ID NO: 39567 - RNA, 20 nt, Artificial Sequence
  HTT spacer sequence TTCN PAM
caagaaaaguauaauagacg

SEQ ID NO: 39568 - RNA, 20 nt, Artificial Sequence
  HTT spacer sequence TTCN PAM
ugagaaaauucugggucuca

SEQ ID NO: 39569 - RNA, 20 nt, Artificial Sequence
  HTT spacer sequence TTCN PAM
ucuauuauacuuuucuugag

SEQ ID NO: 39570 - RNA, 20 nt, Artificial Sequence
  HTT spacer sequence TTCN PAM
ucccacacucucaauucguc

SEQ ID NO: 39571 - RNA, 20 nt, Artificial Sequence
  HTT spacer sequence TTCN PAM
ucuucaucccacacucucaa

SEQ ID NO: 39572 - RNA, 20 nt, Artificial Sequence
  HTT spacer sequence TTCN PAM
guguuuaaagaauuuugugc

SEQ ID NO: 39573 - RNA, 20 nt, Artificial Sequence
  HTT spacer sequence TTCN PAM
uuaaacacagaaaguaaguu

SEQ ID NO: 39574 - RNA, 20 nt, Artificial Sequence
  HTT spacer sequence TTCN PAM
uuucauggacugauugaaaa

SEQ ID NO: 39575 - RNA, 20 nt, Artificial Sequence
  HTT spacer sequence TTCN PAM
uggacugauugaaaaggaag

SEQ ID NO: 39576 - RNA, 20 nt, Artificial Sequence
  HTT spacer sequence TTCN PAM
aucaguccaugaaaagaauc

SEQ ID NO: 39577 - RNA, 20 nt, Artificial Sequence
  HTT spacer sequence TTCN PAM
uuuucaaucaguccaugaaa

SEQ ID NO: 39578 - RNA, 20 nt, Artificial Sequence
  HTT spacer sequence TTCN PAM
ugccuacuuccuuuucaauc

SEQ ID NO: 39579 - RNA, 20 nt, Artificial Sequence
  HTT spacer sequence TTCN PAM
cugaagauuucucugauguc

SEQ ID NO: 39580 - RNA, 20 nt, Artificial Sequence
  HTT spacer sequence TTCN PAM
gugaaauaagacauuccugc

SEQ ID NO: 39581 - RNA, 20 nt, Artificial Sequence
  HTT spacer sequence TTCN PAM
cugaugucauccuuaucauu

SEQ ID NO: 39582 - RNA, 20 nt, Artificial Sequence
  HTT spacer sequence TTCN PAM
augauuuaaaaaaaccucuc

SEQ ID NO: 39583 - RNA, 20 nt, Artificial Sequence
  HTT spacer sequence TTCN PAM
uccgaaauauuccucuuuuc

SEQ ID NO: 39584 - RNA, 20 nt, Artificial Sequence
  HTT spacer sequence TTCN PAM
gaggaacucuccuuacuuug

SEQ ID NO: 39585 - RNA, 20 nt, Artificial Sequence
  HTT spacer sequence TTCN PAM
ucuuuucuucuaacacuccu

SEQ ID NO: 39586 - RNA, 20 nt, Artificial Sequence
  HTT spacer sequence TTCN PAM
ucuaacacuccugacagucc

SEQ ID NO: 39587 - RNA, 20 nt, Artificial Sequence
  HTT spacer sequence TTCN PAM
aacacuccugacaguccgca

SEQ ID NO: 39588 - RNA, 20 nt, Artificial Sequence
  HTT spacer sequence TTCN PAM
ucgucaccucacgcuuuugu

SEQ ID NO: 39589 - RNA, 20 nt, Artificial Sequence
  HTT spacer sequence TTCN PAM
gucccugagagcuggaauag

SEQ ID NO: 39590 - RNA, 20 nt, Artificial Sequence
  HTT spacer sequence TTCN PAM
agcucucagggacagaagug

SEQ ID NO: 39591 - RNA, 20 nt, Artificial Sequence
  HTT spacer sequence TTCN PAM
gcagcacagccugugccuca

SEQ ID NO: 39592 - RNA, 20 nt, Artificial Sequence
  HTT spacer sequence TTCN PAM
cuuuaacgcacaaauacagu

SEQ ID NO: 39593 - RNA, 20 nt, Artificial Sequence
  HTT spacer sequence TTCN PAM
cucacuuucugugguccugc

SEQ ID NO: 39594 - RNA, 20 nt, Artificial Sequence
  HTT spacer sequence TTCN PAM
gugguccugcagcugcuggc

SEQ ID NO: 39595 - RNA, 20 nt, Artificial Sequence
  HTT spacer sequence TTCN PAM
gaggccgaggacugaggcca

SEQ ID NO: 39596 - RNA, 20 nt, Artificial Sequence
  HTT spacer sequence TTCN PAM
uacagaguggcuggccugcg

SEQ ID NO: 39597 - RNA, 20 nt, Artificial Sequence
  HTT spacer sequence TTCN PAM
ggugccagugcguguguaac

SEQ ID NO: 39598 - RNA, 20 nt, Artificial Sequence
  HTT spacer sequence TTCN PAM
acaaaauacaucuccaccac

SEQ ID NO: 39599 - RNA, 20 nt, Artificial Sequence
  HTT spacer sequence TTCN PAM
uuuuauucuacaaaauacau

SEQ ID NO: 39600 - RNA, 20 nt, Artificial Sequence
  HTT spacer sequence TTCN PAM
auuuccuauuuuauguacaa

SEQ ID NO: 39601 - RNA, 20 nt, Artificial Sequence
  HTT spacer sequence TTCN PAM
uauuuuauguacaaugaaaa

SEQ ID NO: 39602 - RNA, 20 nt, Artificial Sequence
  HTT spacer sequence TTCN PAM
uuguacauaaaauaggaaau

SEQ ID NO: 39603 - RNA, 20 nt, Artificial Sequence
  HTT spacer sequence TTCN PAM
uuaaugaaaagaaacaggac

SEQ ID NO: 39604 - RNA, 20 nt, Artificial Sequence
  HTT spacer sequence TTCN PAM
uuaaggaaguuuauccuccc

SEQ ID NO: 39605 - RNA, 20 nt, Artificial Sequence
  HTT spacer sequence TTCN PAM
uuucauuaaggaaguuuauc

SEQ ID NO: 39606 - RNA, 20 nt, Artificial Sequence
  HTT spacer sequence TTCN PAM
ggguccuguuucuuuucauu

SEQ ID NO: 39607 - RNA, 20 nt, Artificial Sequence
  HTT spacer sequence TTCN PAM
aaacaccggucacuuuaucc

SEQ ID NO: 39608 - RNA, 20 nt, Artificial Sequence
  HTT spacer sequence TTCN PAM
ugcuuucucuuucugccgug

SEQ ID NO: 39609 - RNA, 20 nt, Artificial Sequence
  HTT spacer sequence TTCN PAM
cuuucugccguguucucacu

SEQ ID NO: 39610 - RNA, 20 nt, Artificial Sequence
  HTT spacer sequence TTCN PAM
gccguguucucacuucuccu

SEQ ID NO: 39611 - RNA, 20 nt, Artificial Sequence
  HTT spacer sequence TTCN PAM
cacuucuccuuucuggcaga

SEQ ID NO: 39612 - RNA, 20 nt, Artificial Sequence
  HTT spacer sequence TTCN PAM
ccuuucuggcagaagacauu

SEQ ID NO: 39613 - RNA, 20 nt, Artificial Sequence
  HTT spacer sequence TTCN PAM
ggcagaagacauucauuucu

SEQ ID NO: 39614 - RNA, 20 nt, Artificial Sequence
  HTT spacer sequence TTCN PAM
gccagaaaggagaagugaga

SEQ ID NO: 39615 - RNA, 20 nt, Artificial Sequence
  HTT spacer sequence TTCN PAM
uuucuugcaggcaauuuaua

SEQ ID NO: 39616 - RNA, 20 nt, Artificial Sequence
  HTT spacer sequence TTCN PAM
ugcaggcaauuuauacauga

SEQ ID NO: 39617 - RNA, 20 nt, Artificial Sequence
  HTT spacer sequence TTCN PAM
uguauaaauugccugcaaga

SEQ ID NO: 39618 - RNA, 20 nt, Artificial Sequence
  HTT spacer sequence TTCN PAM
ccauauauaauaaguuuuau

SEQ ID NO: 39619 - RNA, 20 nt, Artificial Sequence
  HTT spacer sequence TTCN PAM
gucagcaauagaugcaggaa

SEQ ID NO: 39620 - RNA, 20 nt, Artificial Sequence
  HTT spacer sequence TTCN PAM
ugcaucuauugcugacagaa

SEQ ID NO: 39621 - RNA, 20 nt, Artificial Sequence
  HTT spacer sequence TTCN PAM
cacccuugggaggugcaggu

SEQ ID NO: 39622 - RNA, 20 nt, Artificial Sequence
  HTT spacer sequence TTCN PAM
ucagagggacacacagagcc

SEQ ID NO: 39623 - RNA, 20 nt, Artificial Sequence
  HTT spacer sequence TTCN PAM
ucagagggacacacagagcc

SEQ ID NO: 39624 - RNA, 20 nt, Artificial Sequence
  HTT spacer sequence TTCN PAM
acccccugcuccuccuucuu

SEQ ID NO: 39625 - RNA, 20 nt, Artificial Sequence
  HTT spacer sequence TTCN PAM
uuucccagugucagacccug

SEQ ID NO: 39626 - RNA, 20 nt, Artificial Sequence
  HTT spacer sequence TTCN PAM
cagugucagacccuggggcc

SEQ ID NO: 39627 - RNA, 20 nt, Artificial Sequence
  HTT spacer sequence TTCN PAM
gggugugcugaugacugucu

SEQ ID NO: 39628 - RNA, 20 nt, Artificial Sequence
  HTT spacer sequence TTCN PAM
ggaaccgcagugggcgggcu

SEQ ID NO: 39629 - RNA, 20 nt, Artificial Sequence
  HTT spacer sequence TTCN PAM
ugaaauucagggugugcuga

SEQ ID NO: 39630 - RNA, 20 nt, Artificial Sequence
  HTT spacer sequence TTCN PAM
uuuuuguguuuuuguuauuu

SEQ ID NO: 39631 - RNA, 20 nt, Artificial Sequence
  HTT spacer sequence TTCN PAM
aucuucaguuucuuugcuua

SEQ ID NO: 39632 - RNA, 20 nt, Artificial Sequence
  HTT spacer sequence TTCN PAM
guuucuuugcuuauaagagu

SEQ ID NO: 39633 - RNA, 20 nt, Artificial Sequence
  HTT spacer sequence TTCN PAM
uugcuuauaagaguaaaaag

SEQ ID NO: 39634 - RNA, 20 nt, Artificial Sequence
  HTT spacer sequence TTCN PAM
gccguuguuagauguagggc

SEQ ID NO: 39635 - RNA, 20 nt, Artificial Sequence
  HTT spacer sequence TTCN PAM
ccugcaggccugagucuggc

SEQ ID NO: 39636 - RNA, 20 nt, Artificial Sequence
  HTT spacer sequence TTCN PAM
ggugccucaggcagaaagag

SEQ ID NO: 39637 - RNA, 20 nt, Artificial Sequence
  HTT spacer sequence TTCN PAM
gccugaggcaccagaagggg

SEQ ID NO: 39638 - RNA, 20 nt, Artificial Sequence
  HTT spacer sequence TTCN PAM
cugggaccacccccccaccc

SEQ ID NO: 39639 - RNA, 20 nt, Artificial Sequence
  HTT spacer sequence TTCN PAM
acacagagaucuuuuuauag

SEQ ID NO: 39640 - RNA, 20 nt, Artificial Sequence
  HTT spacer sequence TTCN PAM
caggcccaccucagugcacu

SEQ ID NO: 39641 - RNA, 20 nt, Artificial Sequence
  HTT spacer sequence TTCN PAM
cauaaaaacacuggggugcu

SEQ ID NO: 39642 - RNA, 20 nt, Artificial Sequence
  HTT spacer sequence TTCN PAM
aaggagggacugaggaguug

SEQ ID NO: 39643 - RNA, 20 nt, Artificial Sequence
  HTT spacer sequence TTCN PAM
aagugagugaucuauuaauc

SEQ ID NO: 39644 - RNA, 20 nt, Artificial Sequence
  HTT spacer sequence TTCN PAM
acgagccgugccagugagag

SEQ ID NO: 39645 - RNA, 20 nt, Artificial Sequence
  HTT spacer sequence TTCN PAM
uguucaugccacgguuucau

SEQ ID NO: 39646 - RNA, 20 nt, Artificial Sequence
  HTT spacer sequence TTCN PAM
ugccacgguuucauucugug

SEQ ID NO: 39647 - RNA, 20 nt, Artificial Sequence
  HTT spacer sequence TTCN PAM
uucugugacgcguaucgugc

SEQ ID NO: 39648 - RNA, 20 nt, Artificial Sequence
  HTT spacer sequence TTCN PAM
gugacgcguaucgugcuuuu

SEQ ID NO: 39649 - RNA, 20 nt, Artificial Sequence
  HTT spacer sequence TTCN PAM
uuaaaaccgagccacaaaac

SEQ ID NO: 39650 - RNA, 20 nt, Artificial Sequence
  HTT spacer sequence TTCN PAM
cuuuuucagaagaaaggggc

SEQ ID NO: 39651 - RNA, 20 nt, Artificial Sequence
  HTT spacer sequence TTCN PAM
gaagaaaggggcugauaaug

SEQ ID NO: 39652 - RNA, 20 nt, Artificial Sequence
  HTT spacer sequence TTCN PAM
gaaaaagugaaaaaacacac

SEQ ID NO: 39653 - RNA, 20 nt, Artificial Sequence
  HTT spacer sequence TTCN PAM
ucugaaaaagugaaaaaaca

SEQ ID NO: 39654 - RNA, 20 nt, Artificial Sequence
  HTT spacer sequence TTCN PAM
cgagggcacucuuuggcuac

SEQ ID NO: 39655 - RNA, 20 nt, Artificial Sequence
  HTT spacer sequence TTCN PAM
agcuggagagaaggaagcac

SEQ ID NO: 39656 - RNA, 20 nt, Artificial Sequence
  HTT spacer sequence TTCN PAM
cuccagcuggaaucugcucc

SEQ ID NO: 39657 - RNA, 20 nt, Artificial Sequence
  HTT spacer sequence TTCN PAM
uucucuccagcuggaaucug

SEQ ID NO: 39658 - RNA, 20 nt, Artificial Sequence
  HTT spacer sequence TTCN PAM
agcauuauagagaggcuuag

SEQ ID NO: 39659 - RNA, 20 nt, Artificial Sequence
  HTT spacer sequence TTCN PAM
ccugcuaagccucucuauaa

SEQ ID NO: 39660 - RNA, 20 nt, Artificial Sequence
  HTT spacer sequence TTCN PAM
cacaaggcagaccauucccc

SEQ ID NO: 39661 - RNA, 20 nt, Artificial Sequence
  HTT spacer sequence TTCN PAM
gacagaagugugaggucgag

SEQ ID NO: 39662 - RNA, 20 nt, Artificial Sequence
  HTT spacer sequence TTCN PAM
gucugaauaacuucccacaa

SEQ ID NO: 39663 - RNA, 20 nt, Artificial Sequence
  HTT spacer sequence TTCN PAM
caacgccccaucucccucca

SEQ ID NO: 39664 - RNA, 20 nt, Artificial Sequence
  HTT spacer sequence TTCN PAM
ucacaacgccccaucucccu

SEQ ID NO: 39665 - RNA, 20 nt, Artificial Sequence
  HTT spacer sequence TTCN PAM
cauuucuucacaacgcccca

SEQ ID NO: 39666 - RNA, 20 nt, Artificial Sequence
  HTT spacer sequence TTCN PAM
uuuucucauuucuucacaac

SEQ ID NO: 39667 - RNA, 20 nt, Artificial Sequence
  HTT spacer sequence TTCN PAM
aggagcaaccgggcaucuuc

SEQ ID NO: 39668 - RNA, 20 nt, Artificial Sequence
  HTT spacer sequence TTCN PAM
uuuuuccaggagcaaccggg

SEQ ID NO: 39669 - RNA, 20 nt, Artificial Sequence
  HTT spacer sequence TTCN PAM
gugcggccgcggcuccagcu

SEQ ID NO: 39670 - RNA, 20 nt, Artificial Sequence
  HTT spacer sequence TTCN PAM
uguggcuuccuccguugguc

SEQ ID NO: 39671 - RNA, 20 nt, Artificial Sequence
  HTT spacer sequence TTCN PAM
uccguuggucaagcucugug

SEQ ID NO: 39672 - RNA, 20 nt, Artificial Sequence
  HTT spacer sequence TTCN PAM
ggcaggccucuuggcacaga

SEQ ID NO: 39673 - RNA, 20 nt, Artificial Sequence
  HTT spacer sequence TTCN PAM
cgcugugaccaccucaccuu

SEQ ID NO: 39674 - RNA, 20 nt, Artificial Sequence
  HTT spacer sequence TTCN PAM
gaagucgggguguggagacu

SEQ ID NO: 39675 - RNA, 20 nt, Artificial Sequence
  HTT spacer sequence TTCN PAM
gaaggugagguggucacagc

SEQ ID NO: 39676 - RNA, 20 nt, Artificial Sequence
  HTT spacer sequence TTCN PAM
ugcuggcacagacgccguac

SEQ ID NO: 39677 - RNA, 20 nt, Artificial Sequence
  HTT spacer sequence TTCN PAM
ccggcuuuccugcuggcaca

SEQ ID NO: 39678 - RNA, 20 nt, Artificial Sequence
  HTT spacer sequence TTCN PAM
caaacacuccguucucgcag

SEQ ID NO: 39679 - RNA, 20 nt, Artificial Sequence
  HTT spacer sequence TTCN PAM
cgcagccucacccuggggac

SEQ ID NO: 39680 - RNA, 20 nt, Artificial Sequence
  HTT spacer sequence TTCN PAM
ccugaacgcuggugguugcc

SEQ ID NO: 39681 - RNA, 20 nt, Artificial Sequence
  HTT spacer sequence TTCN PAM
ggagaagggagcgggaggau

SEQ ID NO: 39682 - RNA, 20 nt, Artificial Sequence
  HTT spacer sequence TTCN PAM
cccaaccauccugcguccca

SEQ ID NO: 39683 - RNA, 20 nt, Artificial Sequence
  HTT spacer sequence TTCN PAM
cucuucccuuccugaccacc

SEQ ID NO: 39684 - RNA, 20 nt, Artificial Sequence
  HTT spacer sequence TTCN PAM
cuuccugaccaccugccccc

SEQ ID NO: 39685 - RNA, 20 nt, Artificial Sequence
  HTT spacer sequence TTCN PAM
ugaccaccugcccccauccu

SEQ ID NO: 39686 - RNA, 20 nt, Artificial Sequence
  HTT spacer sequence TTCN PAM
ugcccgugcuaggggcagcu

SEQ ID NO: 39687 - RNA, 20 nt, Artificial Sequence
  HTT spacer sequence TTCN PAM
aucauuuuaauuauucaucu

SEQ ID NO: 39688 - RNA, 20 nt, Artificial Sequence
  HTT spacer sequence TTCN PAM
ucuguguuggugcuuuuguc

SEQ ID NO: 39689 - RNA, 20 nt, Artificial Sequence
  HTT spacer sequence TTCN PAM
cucaacagacagcucucgug

SEQ ID NO: 39690 - RNA, 20 nt, Artificial Sequence
  HTT spacer sequence TTCN PAM
gcagacaucagccagagcgu

SEQ ID NO: 39691 - RNA, 20 nt, Artificial Sequence
  HTT spacer sequence TTCN PAM
gugauuuuccuuuuagucgu

SEQ ID NO: 39692 - RNA, 20 nt, Artificial Sequence
  HTT spacer sequence TTCN PAM
uuuuagucgugaaaccuucu

SEQ ID NO: 39693 - RNA, 20 nt, Artificial Sequence
  HTT spacer sequence TTCN PAM
cgacuaaaaggaaaaucacu

SEQ ID NO: 39694 - RNA, 20 nt, Artificial Sequence
  HTT spacer sequence TTCN PAM
caaaaagcacacacaagcac

SEQ ID NO: 39695 - RNA, 20 nt, Artificial Sequence
  HTT spacer sequence TTCN PAM
gugcuugugugugcuuuuug

SEQ ID NO: 39696 - RNA, 20 nt, Artificial Sequence
  HTT spacer sequence TTCN PAM
gcuucugugcuugugugugc

SEQ ID NO: 39697 - RNA, 20 nt, Artificial Sequence
  HTT spacer sequence TTCN PAM
agugccuucacccaacacgc

SEQ ID NO: 39698 - RNA, 20 nt, Artificial Sequence
  HTT spacer sequence TTCN PAM
cccaacacgcgggccuuugg

SEQ ID NO: 39699 - RNA, 20 nt, Artificial Sequence
  HTT spacer sequence TTCN PAM
gccauggccaggucugagcu

SEQ ID NO: 39700 - RNA, 20 nt, Artificial Sequence
  HTT spacer sequence TTCN PAM
ggcuccaccugcagcuccac

SEQ ID NO: 39701 - RNA, 20 nt, Artificial Sequence
  HTT spacer sequence TTCN PAM
cucuccuagccuugugucuu

SEQ ID NO: 39702 - RNA, 20 nt, Artificial Sequence
  HTT spacer sequence TTCN PAM
ucucgccgguccuuguuagc

SEQ ID NO: 39703 - RNA, 20 nt, Artificial Sequence
  HTT spacer sequence TTCN PAM
cuaacaaggaccggcgagau

SEQ ID NO: 39704 - RNA, 20 nt, Artificial Sequence
  HTT spacer sequence TTCN PAM
ucuuuaaaauauaaaguaua

SEQ ID NO: 39705 - RNA, 20 nt, Artificial Sequence
  HTT spacer sequence TTCN PAM
cuuugucugauauuaauauu

SEQ ID NO: 39706 - RNA, 20 nt, Artificial Sequence
  HTT spacer sequence TTCN PAM
uuuuauugcuuuuucacuuu

SEQ ID NO: 39707 - RNA, 20 nt, Artificial Sequence
  HTT spacer sequence TTCN PAM
gcaaaucucaugcuacuuuu

SEQ ID NO: 39708 - RNA, 20 nt, Artificial Sequence
  HTT spacer sequence TTCN PAM
guucugcaaaucucaugcua

SEQ ID NO: 39709 - RNA, 20 nt, Artificial Sequence
  HTT spacer sequence TTCN PAM
cccucggaguacuuacccau

SEQ ID NO: 39710 - RNA, 20 nt, Artificial Sequence
  HTT spacer sequence TTCN PAM
gaaaccaagagaucaagcug

SEQ ID NO: 39711 - RNA, 20 nt, Artificial Sequence
  HTT spacer sequence TTCN PAM
gaaaaagguguguaauaauu

SEQ ID NO: 39712 - RNA, 20 nt, Artificial Sequence
  HTT spacer sequence TTCN PAM
gcuugaucucuugguuucug

SEQ ID NO: 39713 - RNA, 20 nt, Artificial Sequence
  HTT spacer sequence TTCN PAM
cauacuuuguaaucuuacua

SEQ ID NO: 39714 - RNA, 20 nt, Artificial Sequence
  HTT spacer sequence TTCN PAM
auucacauacuuuguaaucu

SEQ ID NO: 39715 - RNA, 20 nt, Artificial Sequence
  HTT spacer sequence TTCN PAM
auuugguacaaagcucucua

SEQ ID NO: 39716 - RNA, 20 nt, Artificial Sequence
  HTT spacer sequence TTCN PAM
aaaguacguggaacauuuac

SEQ ID NO: 39717 - RNA, 20 nt, Artificial Sequence
  HTT spacer sequence TTCN PAM
acguacuuuagaaaaaaagu

SEQ ID NO: 39718 - RNA, 20 nt, Artificial Sequence
  HTT spacer sequence TTCN PAM
cuguaugcuauaauuuuuuu

SEQ ID NO: 39719 - RNA, 20 nt, Artificial Sequence
  HTT spacer sequence TTCN PAM
aauacacugcugucaggagc

SEQ ID NO: 39720 - RNA, 20 nt, Artificial Sequence
  HTT spacer sequence TTCN PAM
auucaaauacacugcuguca

SEQ ID NO: 39721 - RNA, 20 nt, Artificial Sequence
  HTT spacer sequence TTCN PAM
uuuuuguuaucauuuuauga

SEQ ID NO: 39722 - RNA, 20 nt, Artificial Sequence
  HTT spacer sequence TTCN PAM
uacauuuuaaaguuuaaaac

SEQ ID NO: 39723 - RNA, 20 nt, Artificial Sequence
  HTT spacer sequence TTCN PAM
aaauaauccaugggucaagg

SEQ ID NO: 39724 - RNA, 20 nt, Artificial Sequence
  HTT spacer sequence TTCN PAM
uugacccauggauuauuuag

SEQ ID NO: 39725 - RNA, 20 nt, Artificial Sequence
  HTT spacer sequence TTCN PAM
uccuugacccauggauuauu

SEQ ID NO: 39726 - RNA, 20 nt, Artificial Sequence
  HTT spacer sequence TTCN PAM
aaacuguaugauaacuccca

SEQ ID NO: 39727 - RNA, 20 nt, Artificial Sequence
  HTT spacer sequence TTCN PAM
auacuacacaucaucaccag

SEQ ID NO: 39728 - RNA, 20 nt, Artificial Sequence
  HTT spacer sequence TTCN PAM
acuggugaugauguguagua

SEQ ID NO: 39729 - RNA, 20 nt, Artificial Sequence
  HTT spacer sequence TTCN PAM
gugaaaaaauuguagcauua

SEQ ID NO: 39730 - RNA, 20 nt, Artificial Sequence
  HTT spacer sequence TTCN PAM
cugaaaaucacuuugauuau

SEQ ID NO: 39731 - RNA, 20 nt, Artificial Sequence
  HTT spacer sequence TTCN PAM
aauauauacauuuaaugcua

SEQ ID NO: 39732 - RNA, 20 nt, Artificial Sequence
  HTT spacer sequence TTCN PAM
aacuuuuuucuaauauauac

SEQ ID NO: 39733 - RNA, 20 nt, Artificial Sequence
  HTT spacer sequence TTCN PAM
uauauuuucaaacuuuuuuc

SEQ ID NO: 39734 - RNA, 20 nt, Artificial Sequence
  HTT spacer sequence TTCN PAM
acagaagcaaguacggaaaa

SEQ ID NO: 39735 - RNA, 20 nt, Artificial Sequence
  HTT spacer sequence TTCN PAM
guugaaaacuuauuuccuau

SEQ ID NO: 39736 - RNA, 20 nt, Artificial Sequence
  HTT spacer sequence TTCN PAM
guacuugcuucuguugaaaa

SEQ ID NO: 39737 - RNA, 20 nt, Artificial Sequence
  HTT spacer sequence TTCN PAM
uuuuuuccguacuugcuucu

SEQ ID NO: 39738 - RNA, 20 nt, Artificial Sequence
  HTT spacer sequence TTCN PAM
uuaauuugcauuuccuuuuu

SEQ ID NO: 39739 - RNA, 20 nt, Artificial Sequence
  HTT spacer sequence TTCN PAM
uuuccuuaauuugcauuucc

SEQ ID NO: 39740 - RNA, 20 nt, Artificial Sequence
  HTT spacer sequence TTCN PAM
gcauuuaucuucauuuccuu

SEQ ID NO: 39741 - RNA, 20 nt, Artificial Sequence
  HTT spacer sequence TTCN PAM
auuuugauaauuucugcauu

SEQ ID NO: 39742 - RNA, 20 nt, Artificial Sequence
  HTT spacer sequence TTCN PAM
uacuuuuaguuguauacugu

SEQ ID NO: 39743 - RNA, 20 nt, Artificial Sequence
  HTT spacer sequence TTCN PAM
ugauuauacuuuuguucaua

SEQ ID NO: 39744 - RNA, 20 nt, Artificial Sequence
  HTT spacer sequence TTCN PAM
ugggcccaagugauccuccu

SEQ ID NO: 39745 - RNA, 20 nt, Artificial Sequence
  HTT spacer sequence TTCN PAM
uuuuuuguagagaugguguu

SEQ ID NO: 39746 - RNA, 20 nt, Artificial Sequence
  HTT spacer sequence TTCN PAM
ucuuuuucuuuuuuuguaga

SEQ ID NO: 39747 - RNA, 20 nt, Artificial Sequence
  HTT spacer sequence TTCN PAM
ugauguuaucuuuguccucu

SEQ ID NO: 39748 - RNA, 20 nt, Artificial Sequence
  HTT spacer sequence TTCN PAM
uucuugauguuaucuuuguc

SEQ ID NO: 39749 - RNA, 20 nt, Artificial Sequence
  HTT spacer sequence TTCN PAM
uagucucuaacuguacuuag

SEQ ID NO: 39750 - RNA, 20 nt, Artificial Sequence
  HTT spacer sequence TTCN PAM
auuaacaacuuuauacugua

SEQ ID NO: 39751 - RNA, 20 nt, Artificial Sequence
  HTT spacer sequence TTCN PAM
uaaagauuguccgguuaauc

SEQ ID NO: 39752 - RNA, 20 nt, Artificial Sequence
  HTT spacer sequence TTCN PAM
uaggccaacuuugaucauuu

SEQ ID NO: 39753 - RNA, 20 nt, Artificial Sequence
  HTT spacer sequence TTCN PAM
ucuuaggccaacuuugauca

SEQ ID NO: 39754 - RNA, 20 nt, Artificial Sequence
  HTT spacer sequence TTCN PAM
acuucuucuuaggccaacuu

SEQ ID NO: 39755 - RNA, 20 nt, Artificial Sequence
  HTT spacer sequence TTCN PAM
aaaucauuuuugccuauguu

SEQ ID NO: 39756 - RNA, 20 nt, Artificial Sequence
  HTT spacer sequence TTCN PAM
uuucuuacacuacauuacau

SEQ ID NO: 39757 - RNA, 20 nt, Artificial Sequence
  HTT spacer sequence TTCN PAM
uacacuacauuacaugccua

SEQ ID NO: 39758 - RNA, 20 nt, Artificial Sequence
  HTT spacer sequence TTCN PAM
aaguguuuuccuccaggagc

SEQ ID NO: 39759 - RNA, 20 nt, Artificial Sequence
  HTT spacer sequence TTCN PAM
uccaggagccaggcuauugg

SEQ ID NO: 39760 - RNA, 20 nt, Artificial Sequence
  HTT spacer sequence TTCN PAM
uaaauggggcacugcaggcc

SEQ ID NO: 39761 - RNA, 20 nt, Artificial Sequence
  HTT spacer sequence TTCN PAM
cucggccacaaggccugcag

SEQ ID NO: 39762 - RNA, 20 nt, Artificial Sequence
  HTT spacer sequence TTCN PAM
gcccugccgucuuuucccuc

SEQ ID NO: 39763 - RNA, 20 nt, Artificial Sequence
  HTT spacer sequence TTCN PAM
cauucauuggccaaagcaua

SEQ ID NO: 39764 - RNA, 20 nt, Artificial Sequence
  HTT spacer sequence TTCN PAM
uuggccaaagcauaacacau

SEQ ID NO: 39765 - RNA, 20 nt, Artificial Sequence
  HTT spacer sequence TTCN PAM
uauaaagcugggauaauaac

SEQ ID NO: 39766 - RNA, 20 nt, Artificial Sequence
  HTT spacer sequence TTCN PAM
cacgcugucccugugaaguc

SEQ ID NO: 39767 - RNA, 20 nt, Artificial Sequence
  HTT spacer sequence TTCN PAM
cagggacagcgugagaacuc

SEQ ID NO: 39768 - RNA, 20 nt, Artificial Sequence
  HTT spacer sequence TTCN PAM
ucacugggcaagacacuccc

SEQ ID NO: 39769 - RNA, 20 nt, Artificial Sequence
  HTT spacer sequence TTCN PAM
agagucacacuguuuggauc

SEQ ID NO: 39770 - RNA, 20 nt, Artificial Sequence
  HTT spacer sequence TTCN PAM
cggcgugguuccagagucac

SEQ ID NO: 39771 - RNA, 20 nt, Artificial Sequence
  HTT spacer sequence TTCN PAM
aggagguggauccucagccu

SEQ ID NO: 39772 - RNA, 20 nt, Artificial Sequence
  HTT spacer sequence TTCN PAM
caggugcugacgggaugucu

SEQ ID NO: 39773 - RNA, 20 nt, Artificial Sequence
  HTT spacer sequence TTCN PAM
cacgauucacaggugcugac

SEQ ID NO: 39774 - RNA, 20 nt, Artificial Sequence
  HTT spacer sequence TTCN PAM
uaaaaccgggugggcaaguu

SEQ ID NO: 39775 - RNA, 20 nt, Artificial Sequence
  HTT spacer sequence TTCN PAM
cuuccuaaaaccgggugggc

SEQ ID NO: 39776 - RNA, 20 nt, Artificial Sequence
  HTT spacer sequence TTCN PAM
gcccauucucuuccuaaaac

SEQ ID NO: 39777 - RNA, 20 nt, Artificial Sequence
  HTT spacer sequence TTCN PAM
ccauggaggagagcccugcc

SEQ ID NO: 39778 - RNA, 20 nt, Artificial Sequence
  HTT spacer sequence TTCN PAM
ccuugcugacuguggagagg

SEQ ID NO: 39779 - RNA, 20 nt, Artificial Sequence
  HTT spacer sequence TTCN PAM
cagggguggagcuggggcuc

SEQ ID NO: 39780 - RNA, 20 nt, Artificial Sequence
  HTT spacer sequence TTCN PAM
aaaaaucuggucaccaugcu

SEQ ID NO: 39781 - RNA, 20 nt, Artificial Sequence
  HTT spacer sequence TTCN PAM
gauaucaaacaaucaaacuu

SEQ ID NO: 39782 - RNA, 20 nt, Artificial Sequence
  HTT spacer sequence TTCN PAM
cauaauuuuaauaauaaaua

SEQ ID NO: 39783 - RNA, 20 nt, Artificial Sequence
  HTT spacer sequence TTCN PAM
gugucuuguguuaccucuuu

SEQ ID NO: 39784 - RNA, 20 nt, Artificial Sequence
  HTT spacer sequence TTCN PAM
uccuucccugaagccugguc

SEQ ID NO: 39785 - RNA, 20 nt, Artificial Sequence
  HTT spacer sequence TTCN PAM
cugaagccugguccucuggc

SEQ ID NO: 39786 - RNA, 20 nt, Artificial Sequence
  HTT spacer sequence TTCN PAM
gggaaggaggaagggccuga

SEQ ID NO: 39787 - RNA, 20 nt, Artificial Sequence
  HTT spacer sequence TTCN PAM
uccucucuaucccuggacuc

SEQ ID NO: 39788 - RNA, 20 nt, Artificial Sequence
  HTT spacer sequence TTCN PAM
guggaagcacagguccccag

SEQ ID NO: 39789 - RNA, 20 nt, Artificial Sequence
  HTT spacer sequence TTCN PAM
acugaaagaguccagggaua

SEQ ID NO: 39790 - RNA, 20 nt, Artificial Sequence
  HTT spacer sequence TTCN PAM
guuuucuguguggguggccc

SEQ ID NO: 39791 - RNA, 20 nt, Artificial Sequence
  HTT spacer sequence TTCN PAM
guguggguggccccaccuug

SEQ ID NO: 39792 - RNA, 20 nt, Artificial Sequence
  HTT spacer sequence TTCN PAM
cucaagccaagguggggcca

SEQ ID NO: 39793 - RNA, 20 nt, Artificial Sequence
  HTT spacer sequence TTCN PAM
ucaugaggucagcauuuggg

SEQ ID NO: 39794 - RNA, 20 nt, Artificial Sequence
  HTT spacer sequence TTCN PAM
gcauuggguggcguccucug

SEQ ID NO: 39795 - RNA, 20 nt, Artificial Sequence
  HTT spacer sequence TTCN PAM
gguuguggcuuggccccacc

SEQ ID NO: 39796 - RNA, 20 nt, Artificial Sequence
  HTT spacer sequence TTCN PAM
gaccuucugguuguggcuug

SEQ ID NO: 39797 - RNA, 20 nt, Artificial Sequence
  HTT spacer sequence TTCN PAM
uguguggccacuggcacaag

SEQ ID NO: 39798 - RNA, 20 nt, Artificial Sequence
  HTT spacer sequence TTCN PAM
ugugccaguggccacacagg

SEQ ID NO: 39799 - RNA, 20 nt, Artificial Sequence
  HTT spacer sequence TTCN PAM
auucuugugccaguggccac

SEQ ID NO: 39800 - RNA, 20 nt, Artificial Sequence
  HTT spacer sequence TTCN PAM
ucuauucuugugccaguggc

SEQ ID NO: 39801 - RNA, 20 nt, Artificial Sequence
  HTT spacer sequence TTCN PAM
ucuucuauucuugugccagu

SEQ ID NO: 39802 - RNA, 20 nt, Artificial Sequence
  HTT spacer sequence TTCN PAM
ucaaaaugaaguaagucagu

SEQ ID NO: 39803 - RNA, 20 nt, Artificial Sequence
  HTT spacer sequence TTCN PAM
uuuugaugaauaaaauauuu

SEQ ID NO: 39804 - RNA, 20 nt, Artificial Sequence
  HTT spacer sequence TTCN PAM
caaaggaauuaaccacuaaa

SEQ ID NO: 39805 - RNA, 20 nt, Artificial Sequence
  HTT spacer sequence TTCN PAM
uuugugaaacugacuuacuu

SEQ ID NO: 39806 - RNA, 20 nt, Artificial Sequence
  HTT spacer sequence TTCN PAM
cauuacucauuuagugguua

SEQ ID NO: 39807 - RNA, 20 nt, Artificial Sequence
  HTT spacer sequence TTCN PAM
gcucaaguaagcauaauaaa

SEQ ID NO: 39808 - RNA, 20 nt, Artificial Sequence
  HTT spacer sequence TTCN PAM
uuuauuaugcuuacuugagc

SEQ ID NO: 39809 - RNA, 20 nt, Artificial Sequence
  HTT spacer sequence TTCN PAM
aagaucaacccuaacugacu

SEQ ID NO: 39810 - RNA, 20 nt, Artificial Sequence
  HTT spacer sequence TTCN PAM
gugucuuuucuuggagcauc

SEQ ID NO: 39811 - RNA, 20 nt, Artificial Sequence
  HTT spacer sequence TTCN PAM
uggagcauccugagggcucc

SEQ ID NO: 39812 - RNA, 20 nt, Artificial Sequence
  HTT spacer sequence TTCN PAM
aggcuuagagcuaccaacua

SEQ ID NO: 39813 - RNA, 20 nt, Artificial Sequence
  HTT spacer sequence TTCN PAM
gagugacaagugacauaauu

SEQ ID NO: 39814 - RNA, 20 nt, Artificial Sequence
  HTT spacer sequence TTCN PAM
cucgucuuugcacaucgccu

SEQ ID NO: 39815 - RNA, 20 nt, Artificial Sequence
  HTT spacer sequence TTCN PAM
cacacugaccuucgcaggag

SEQ ID NO: 39816 - RNA, 20 nt, Artificial Sequence
  HTT spacer sequence TTCN PAM
caggagccgcucugcucacu

SEQ ID NO: 39817 - RNA, 20 nt, Artificial Sequence
  HTT spacer sequence TTCN PAM
cccccgccuguuggcauuuc

SEQ ID NO: 39818 - RNA, 20 nt, Artificial Sequence
  HTT spacer sequence TTCN PAM
cucuccagaaggacuuggug

SEQ ID NO: 39819 - RNA, 20 nt, Artificial Sequence
  HTT spacer sequence TTCN PAM
ggagagugaaaugccaacag

SEQ ID NO: 39820 - RNA, 20 nt, Artificial Sequence
  HTT spacer sequence TTCN PAM
gacguagagaguuuguuuug

SEQ ID NO: 39821 - RNA, 20 nt, Artificial Sequence
  HTT spacer sequence TTCN PAM
ggcagagcccagcaaaacaa

SEQ ID NO: 39822 - RNA, 20 nt, Artificial Sequence
  HTT spacer sequence TTCN PAM
aguacugacuccaggaaaga

SEQ ID NO: 39823 - RNA, 20 nt, Artificial Sequence
  HTT spacer sequence TTCN PAM
uggagucaguacuagaaacg

SEQ ID NO: 39824 - RNA, 20 nt, Artificial Sequence
  HTT spacer sequence TTCN PAM
gggucuuuccuggagucagu

SEQ ID NO: 39825 - RNA, 20 nt, Artificial Sequence
  HTT spacer sequence TTCN PAM
gauuucuccuguuugggccc

SEQ ID NO: 39826 - RNA, 20 nt, Artificial Sequence
  HTT spacer sequence TTCN PAM
ccuguuugggcccacauuuc

SEQ ID NO: 39827 - RNA, 20 nt, Artificial Sequence
  HTT spacer sequence TTCN PAM
ucuggcccucugagguaacg

SEQ ID NO: 39828 - RNA, 20 nt, Artificial Sequence
  HTT spacer sequence TTCN PAM
ggcccucugagguaacggga

SEQ ID NO: 39829 - RNA, 20 nt, Artificial Sequence
  HTT spacer sequence TTCN PAM
cguuaccucagagggccaga

SEQ ID NO: 39830 - RNA, 20 nt, Artificial Sequence
  HTT spacer sequence TTCN PAM
gggcugaccgugagucuggc

SEQ ID NO: 39831 - RNA, 20 nt, Artificial Sequence
  HTT spacer sequence TTCN PAM
ccauggugaggucccgguau

SEQ ID NO: 39832 - RNA, 20 nt, Artificial Sequence
  HTT spacer sequence TTCN PAM
augaccugccugggcugaca

SEQ ID NO: 39833 - RNA, 20 nt, Artificial Sequence
  HTT spacer sequence TTCN PAM
ucuguaaaaugggcugauug

SEQ ID NO: 39834 - RNA, 20 nt, Artificial Sequence
  HTT spacer sequence TTCN PAM
gaggaggugcuauuccagau

SEQ ID NO: 39835 - RNA, 20 nt, Artificial Sequence
  HTT spacer sequence TTCN PAM
agaucccuguuuucuaaccc

SEQ ID NO: 39836 - RNA, 20 nt, Artificial Sequence
  HTT spacer sequence TTCN PAM
aacccucagcaggcucugcu

SEQ ID NO: 39837 - RNA, 20 nt, Artificial Sequence
  HTT spacer sequence TTCN PAM
ugcccgacauguccuccuuc

SEQ ID NO: 39838 - RNA, 20 nt, Artificial Sequence
  HTT spacer sequence TTCN PAM
uccgcaagccagccccucac

SEQ ID NO: 39839 - RNA, 20 nt, Artificial Sequence
  HTT spacer sequence TTCN PAM
acuguguccccacccaaauc

SEQ ID NO: 39840 - RNA, 20 nt, Artificial Sequence
  HTT spacer sequence TTCN PAM
ggccugcccauaggaugccu

SEQ ID NO: 39841 - RNA, 20 nt, Artificial Sequence
  HTT spacer sequence TTCN PAM
acccaugccuuacuggccag

SEQ ID NO: 39842 - RNA, 20 nt, Artificial Sequence
  HTT spacer sequence TTCN PAM
ggccaguaaggcaugggugg

SEQ ID NO: 39843 - RNA, 20 nt, Artificial Sequence
  HTT spacer sequence TTCN PAM
caguaccaccaccccgcccc

SEQ ID NO: 39844 - RNA, 20 nt, Artificial Sequence
  HTT spacer sequence TTCN PAM
cucccacacaccaggccacu

SEQ ID NO: 39845 - RNA, 20 nt, Artificial Sequence
  HTT spacer sequence TTCN PAM
aaggggaugauggggaccag

SEQ ID NO: 39846 - RNA, 20 nt, Artificial Sequence
  HTT spacer sequence TTCN PAM
aaggugauuccaaggggaug

SEQ ID NO: 39847 - RNA, 20 nt, Artificial Sequence
  HTT spacer sequence TTCN PAM
aaaugauccaggguuuucca

SEQ ID NO: 39848 - RNA, 20 nt, Artificial Sequence
  HTT spacer sequence TTCN PAM
accuugauacugugaugagc

SEQ ID NO: 39849 - RNA, 20 nt, Artificial Sequence
  HTT spacer sequence TTCN PAM
ucuucuaccuugauacugug

SEQ ID NO: 39850 - RNA, 20 nt, Artificial Sequence
  HTT spacer sequence TTCN PAM
gccaccaugugaucuuacug

SEQ ID NO: 39851 - RNA, 20 nt, Artificial Sequence
  HTT spacer sequence TTCN PAM
aaggagcccacagucucagg

SEQ ID NO: 39852 - RNA, 20 nt, Artificial Sequence
  HTT spacer sequence TTCN PAM
ggauguggcucuguuuucac

SEQ ID NO: 39853 - RNA, 20 nt, Artificial Sequence
  HTT spacer sequence TTCN PAM
cugccuaccagcucuccagc

SEQ ID NO: 39854 - RNA, 20 nt, Artificial Sequence
  HTT spacer sequence TTCN PAM
ccuugguucuuggagaccug

SEQ ID NO: 39855 - RNA, 20 nt, Artificial Sequence
  HTT spacer sequence TTCN PAM
uggagaccugauuugcuucc

SEQ ID NO: 39856 - RNA, 20 nt, Artificial Sequence
  HTT spacer sequence TTCN PAM
aaucaaccccuuccuacuca

SEQ ID NO: 39857 - RNA, 20 nt, Artificial Sequence
  HTT spacer sequence TTCN PAM
uacucaguggccagccuauu

SEQ ID NO: 39858 - RNA, 20 nt, Artificial Sequence
  HTT spacer sequence TTCN PAM
ccauuugcaaccagcaaccc

SEQ ID NO: 39859 - RNA, 20 nt, Artificial Sequence
  HTT spacer sequence TTCN PAM
ggggaaacuucuggcuauaa

SEQ ID NO: 39860 - RNA, 20 nt, Artificial Sequence
  HTT spacer sequence TTCN PAM
ccagaaguuauagccagggu

SEQ ID NO: 39861 - RNA, 20 nt, Artificial Sequence
  HTT spacer sequence TTCN PAM
ggcuauaacuucugaggcac

SEQ ID NO: 39862 - RNA, 20 nt, Artificial Sequence
  HTT spacer sequence TTCN PAM
gaggcacggagcggggcagg

SEQ ID NO: 39863 - RNA, 20 nt, Artificial Sequence
  HTT spacer sequence TTCN PAM
ugcaggaggaggagguggcc

SEQ ID NO: 39864 - RNA, 20 nt, Artificial Sequence
  HTT spacer sequence TTCN PAM
uccaccuuucagcagcccug

SEQ ID NO: 39865 - RNA, 20 nt, Artificial Sequence
  HTT spacer sequence TTCN PAM
gcagcccuggagccgcaugg

SEQ ID NO: 39866 - RNA, 20 nt, Artificial Sequence
  HTT spacer sequence TTCN PAM
cugcuccaugcggcuccagg

SEQ ID NO: 39867 - RNA, 20 nt, Artificial Sequence
  HTT spacer sequence TTCN PAM
aggcugugugggagcaggug

SEQ ID NO: 39868 - RNA, 20 nt, Artificial Sequence
  HTT spacer sequence TTCN PAM
ugagugcuggcccgggccca

SEQ ID NO: 39869 - RNA, 20 nt, Artificial Sequence
  HTT spacer sequence TTCN PAM
ugcuccccacacaucccagg

SEQ ID NO: 39870 - RNA, 20 nt, Artificial Sequence
  HTT spacer sequence TTCN PAM
gcggaaggcggcugguggcu

SEQ ID NO: 39871 - RNA, 20 nt, Artificial Sequence
  HTT spacer sequence TTCN PAM
gcagaacaguugcuggguca

SEQ ID NO: 39872 - RNA, 20 nt, Artificial Sequence
  HTT spacer sequence TTCN PAM
gcuuccugggccuggugucc

SEQ ID NO: 39873 - RNA, 20 nt, Artificial Sequence
  HTT spacer sequence TTCN PAM
ugggccuggugucccccgcc

SEQ ID NO: 39874 - RNA, 20 nt, Artificial Sequence
  HTT spacer sequence TTCN PAM
gugaugucuugucagggccu

SEQ ID NO: 39875 - RNA, 20 nt, Artificial Sequence
  HTT spacer sequence TTCN PAM
auuugcuccucagugcgagg

SEQ ID NO: 39876 - RNA, 20 nt, Artificial Sequence
  HTT spacer sequence TTCN PAM
ucccauccagacccuaggcu

SEQ ID NO: 39877 - RNA, 20 nt, Artificial Sequence
  HTT spacer sequence TTCN PAM
uuucaucccauccagacccu

SEQ ID NO: 39878 - RNA, 20 nt, Artificial Sequence
  HTT spacer sequence TTCN PAM
uucuucucccccgagaaccg

SEQ ID NO: 39879 - RNA, 20 nt, Artificial Sequence
  HTT spacer sequence TTCN PAM
ucucccccgagaaccgucag

SEQ ID NO: 39880 - RNA, 20 nt, Artificial Sequence
  HTT spacer sequence TTCN PAM
cccccgagaaccgucagccc

SEQ ID NO: 39881 - RNA, 20 nt, Artificial Sequence
  HTT spacer sequence TTCN PAM
cgggggagaagaaggaaggg

SEQ ID NO: 39882 - RNA, 20 nt, Artificial Sequence
  HTT spacer sequence TTCN PAM
agggugccaucgccccuccc

SEQ ID NO: 39883 - RNA, 20 nt, Artificial Sequence
  HTT spacer sequence TTCN PAM
cguaucugcugggugucccc

SEQ ID NO: 39884 - RNA, 20 nt, Artificial Sequence
  HTT spacer sequence TTCN PAM
gcagagaggccaugugcuuu

SEQ ID NO: 39885 - RNA, 20 nt, Artificial Sequence
  HTT spacer sequence TTCN PAM
ucugcagagaggccaugugc

SEQ ID NO: 39886 - RNA, 20 nt, Artificial Sequence
  HTT spacer sequence TTCN PAM
ggacucccccuccuugaccc

SEQ ID NO: 39887 - RNA, 20 nt, Artificial Sequence
  HTT spacer sequence TTCN PAM
gcccccaucccaggcaagag

SEQ ID NO: 39888 - RNA, 20 nt, Artificial Sequence
  HTT spacer sequence TTCN PAM
cauuaaaagccugcagggac

SEQ ID NO: 39889 - RNA, 20 nt, Artificial Sequence
  HTT spacer sequence TTCN PAM
guucccauuaaaagccugca

SEQ ID NO: 39890 - RNA, 20 nt, Artificial Sequence
  HTT spacer sequence TTCN PAM
uccauuucuguucccauuaa

SEQ ID NO: 39891 - RNA, 20 nt, Artificial Sequence
  HTT spacer sequence TTCN PAM
cccacacugaggugaccccu

SEQ ID NO: 39892 - RNA, 20 nt, Artificial Sequence
  HTT spacer sequence TTCN PAM
cagacuggcaucugccccua

SEQ ID NO: 39893 - RNA, 20 nt, Artificial Sequence
  HTT spacer sequence TTCN PAM
aacaauccggcuucccagac

SEQ ID NO: 39894 - RNA, 20 nt, Artificial Sequence
  HTT spacer sequence TTCN PAM
aaaagcagagacaaccaccu

SEQ ID NO: 39895 - RNA, 20 nt, Artificial Sequence
  HTT spacer sequence TTCN PAM
uuuucaaaaagcagagacaa

SEQ ID NO: 39896 - RNA, 20 nt, Artificial Sequence
  HTT spacer sequence TTCN PAM
ccugcgggcggcucccccac

SEQ ID NO: 39897 - RNA, 20 nt, Artificial Sequence
  HTT spacer sequence TTCN PAM
aaauagcucgcagggcccug

SEQ ID NO: 39898 - RNA, 20 nt, Artificial Sequence
  HTT spacer sequence TTCN PAM
gcgccgccgcgcucgccccg

SEQ ID NO: 39899 - RNA, 20 nt, Artificial Sequence
  HTT spacer sequence TTCN PAM
gucaugguuccgcgccgccg

SEQ ID NO: 39900 - RNA, 20 nt, Artificial Sequence
  HTT spacer sequence TTCN PAM
ugccgucccgcagcuugacc

SEQ ID NO: 39901 - RNA, 20 nt, Artificial Sequence
  HTT spacer sequence TTCN PAM
acugcggggacaggggggag

SEQ ID NO: 39902 - RNA, 20 nt, Artificial Sequence
  HTT spacer sequence TTCN PAM
gcagcaccagccaccuacuc

SEQ ID NO: 39903 - RNA, 20 nt, Artificial Sequence
  HTT spacer sequence TTCN PAM
cggcggggugacagcggcgg

SEQ ID NO: 39904 - RNA, 20 nt, Artificial Sequence
  HTT spacer sequence TTCN PAM
guccagggcccccaccugcg

SEQ ID NO: 39905 - RNA, 20 nt, Artificial Sequence
  HTT spacer sequence TTCN PAM
uccguccagggcccccaccu

SEQ ID NO: 39906 - RNA, 20 nt, Artificial Sequence
  HTT spacer sequence TTCN PAM
agcagggcagacugaggccc

SEQ ID NO: 39907 - RNA, 20 nt, Artificial Sequence
  HTT spacer sequence TTCN PAM
ggggggccccuugcugcucu

SEQ ID NO: 39908 - RNA, 20 nt, Artificial Sequence
  HTT spacer sequence TTCN PAM
acaagcacagcucaacccuc

SEQ ID NO: 39909 - RNA, 20 nt, Artificial Sequence
  HTT spacer sequence TTCN PAM
ggggcccugcucugagcguu

SEQ ID NO: 39910 - RNA, 20 nt, Artificial Sequence
  HTT spacer sequence TTCN PAM
cccagcaauguggcagucac

SEQ ID NO: 39911 - RNA, 20 nt, Artificial Sequence
  HTT spacer sequence TTCN PAM
uccaggaccaccugaggccc

SEQ ID NO: 39912 - RNA, 20 nt, Artificial Sequence
  HTT spacer sequence TTCN PAM
ugccugccuccgccuccccu

SEQ ID NO: 39913 - RNA, 20 nt, Artificial Sequence
  HTT spacer sequence TTCN PAM
ccacucagcccuccgugccc

SEQ ID NO: 39914 - RNA, 20 nt, Artificial Sequence
  HTT spacer sequence TTCN PAM
uauaccagguccccugcagc

SEQ ID NO: 39915 - RNA, 20 nt, Artificial Sequence
  HTT spacer sequence TTCN PAM
ugggaugcggccucucugga

SEQ ID NO: 39916 - RNA, 20 nt, Artificial Sequence
  HTT spacer sequence TTCN PAM
cccccgacacuccucuuugg

SEQ ID NO: 39917 - RNA, 20 nt, Artificial Sequence
  HTT spacer sequence TTCN PAM
uucugcaucagacaguccca

SEQ ID NO: 39918 - RNA, 20 nt, Artificial Sequence
  HTT spacer sequence TTCN PAM
gcaucagacagucccaggag

SEQ ID NO: 39919 - RNA, 20 nt, Artificial Sequence
  HTT spacer sequence TTCN PAM
ccuacagacucacagauugu

SEQ ID NO: 39920 - RNA, 20 nt, Artificial Sequence
  HTT spacer sequence TTCN PAM
ggggcuggcgugggagguga

SEQ ID NO: 39921 - RNA, 20 nt, Artificial Sequence
  HTT spacer sequence TTCN PAM
acuaccccacaucaccuccc

SEQ ID NO: 39922 - RNA, 20 nt, Artificial Sequence
  HTT spacer sequence TTCN PAM
uuccaagccuugaggccagg

SEQ ID NO: 39923 - RNA, 20 nt, Artificial Sequence
  HTT spacer sequence TTCN PAM
aagccuugaggccagguguc

SEQ ID NO: 39924 - RNA, 20 nt, Artificial Sequence
  HTT spacer sequence TTCN PAM
guguuggucacuccagcagc

SEQ ID NO: 39925 - RNA, 20 nt, Artificial Sequence
  HTT spacer sequence TTCN PAM
acccugggcugcuggaguga

SEQ ID NO: 39926 - RNA, 20 nt, Artificial Sequence
  HTT spacer sequence TTCN PAM
cacgcccaccuccccacccu

SEQ ID NO: 39927 - RNA, 20 nt, Artificial Sequence
  HTT spacer sequence TTCN PAM
ccuggccccucauaagccuc

SEQ ID NO: 39928 - RNA, 20 nt, Artificial Sequence
  HTT spacer sequence TTCN PAM
cccagcugccuucccgcuca

SEQ ID NO: 39929 - RNA, 20 nt, Artificial Sequence
  HTT spacer sequence TTCN PAM
cgcucagcgcuggagaccac

SEQ ID NO: 39930 - RNA, 20 nt, Artificial Sequence
  HTT spacer sequence TTCN PAM
ucucucccucacaccaggag

SEQ ID NO: 39931 - RNA, 20 nt, Artificial Sequence
  HTT spacer sequence TTCN PAM
uuguaagacaggcaggguuc

SEQ ID NO: 39932 - RNA, 20 nt, Artificial Sequence
  HTT spacer sequence TTCN PAM
uuuuguuaccaguggugauu

SEQ ID NO: 39933 - RNA, 20 nt, Artificial Sequence
  HTT spacer sequence TTCN PAM
uucugggaagggccccgaug

SEQ ID NO: 39934 - RNA, 20 nt, Artificial Sequence
  HTT spacer sequence TTCN PAM
gggaagggccccgaugugca

SEQ ID NO: 39935 - RNA, 20 nt, Artificial Sequence
  HTT spacer sequence TTCN PAM
cagaaggaaaucaccacugg

SEQ ID NO: 39936 - RNA, 20 nt, Artificial Sequence
  HTT spacer sequence TTCN PAM
acuggcaccuuucuccuccu

SEQ ID NO: 39937 - RNA, 20 nt, Artificial Sequence
  HTT spacer sequence TTCN PAM
ccuccuugcguuuuucucaa

SEQ ID NO: 39938 - RNA, 20 nt, Artificial Sequence
  HTT spacer sequence TTCN PAM
caaucgugagcacgucuuuc

SEQ ID NO: 39939 - RNA, 20 nt, Artificial Sequence
  HTT spacer sequence TTCN PAM
guuaugacaagguuuagcga

SEQ ID NO: 39940 - RNA, 20 nt, Artificial Sequence
  HTT spacer sequence TTCN PAM
cuaaaccuugucauaacaga

SEQ ID NO: 39941 - RNA, 20 nt, Artificial Sequence
  HTT spacer sequence TTCN PAM
uucgcuaaaccuugucauaa

SEQ ID NO: 39942 - RNA, 20 nt, Artificial Sequence
  HTT spacer sequence TTCN PAM
cuuucauucgcuaaaccuug

SEQ ID NO: 39943 - RNA, 20 nt, Artificial Sequence
  HTT spacer sequence TTCN PAM
ucaaugucuccaccgcgucc

SEQ ID NO: 39944 - RNA, 20 nt, Artificial Sequence
  HTT spacer sequence TTCN PAM
gcagugaggacgcgguggag

SEQ ID NO: 39945 - RNA, 20 nt, Artificial Sequence
  HTT spacer sequence TTCN PAM
uccucccaggugcgggggcu

SEQ ID NO: 39946 - RNA, 20 nt, Artificial Sequence
  HTT spacer sequence TTCN PAM
ucccaggugcgggggcuggg

SEQ ID NO: 39947 - RNA, 20 nt, Artificial Sequence
  HTT spacer sequence TTCN PAM
ucaccacccccagcccccgc

SEQ ID NO: 39948 - RNA, 20 nt, Artificial Sequence
  HTT spacer sequence TTCN PAM
ugacauccuguggagagugu

SEQ ID NO: 39949 - RNA, 20 nt, Artificial Sequence
  HTT spacer sequence TTCN PAM
cacaggggcugccccugggg

SEQ ID NO: 39950 - RNA, 20 nt, Artificial Sequence
  HTT spacer sequence TTCN PAM
uccagcucagaaaagccacc

SEQ ID NO: 39951 - RNA, 20 nt, Artificial Sequence
  HTT spacer sequence TTCN PAM
gagcuggaugaagcccccag

SEQ ID NO: 39952 - RNA, 20 nt, Artificial Sequence
  HTT spacer sequence TTCN PAM
ccccaccauggugacuccaa

SEQ ID NO: 39953 - RNA, 20 nt, Artificial Sequence
  HTT spacer sequence TTCN PAM
gcuuccccccaccaugguga

SEQ ID NO: 39954 - RNA, 20 nt, Artificial Sequence
  HTT spacer sequence TTCN PAM
gaguuucagcuuccccccac

SEQ ID NO: 39955 - RNA, 20 nt, Artificial Sequence
  HTT spacer sequence TTCN PAM
ccccagccagcccaaaccuu

SEQ ID NO: 39956 - RNA, 20 nt, Artificial Sequence
  HTT spacer sequence TTCN PAM
agccagcuguggggggcaag

SEQ ID NO: 39957 - RNA, 20 nt, Artificial Sequence
  HTT spacer sequence TTCN PAM
gcgccugcccccgggcugau

SEQ ID NO: 39958 - RNA, 20 nt, Artificial Sequence
  HTT spacer sequence TTCN PAM
ugagcagagccuccuggugg

SEQ ID NO: 39959 - RNA, 20 nt, Artificial Sequence
  HTT spacer sequence TTCN PAM
ugugcgucuggcuccugccc

SEQ ID NO: 39960 - RNA, 20 nt, Artificial Sequence
  HTT spacer sequence TTCN PAM
gcccggagcugggaugucag

SEQ ID NO: 39961 - RNA, 20 nt, Artificial Sequence
  HTT spacer sequence TTCN PAM
auggggagaggauaacuggc

SEQ ID NO: 39962 - RNA, 20 nt, Artificial Sequence
  HTT spacer sequence TTCN PAM
ugauguuucuauggggagag

SEQ ID NO: 39963 - RNA, 20 nt, Artificial Sequence
  HTT spacer sequence TTCN PAM
cucagcccccgcgucaggac

SEQ ID NO: 39964 - RNA, 20 nt, Artificial Sequence
  HTT spacer sequence TTCN PAM
cuguccugacgcgggggcug

SEQ ID NO: 39965 - RNA, 20 nt, Artificial Sequence
  HTT spacer sequence TTCN PAM
gcucucagcuccacaugugg

SEQ ID NO: 39966 - RNA, 20 nt, Artificial Sequence
  HTT spacer sequence TTCN PAM
ccgccugcguccucgucuac

SEQ ID NO: 39967 - protein, 84 aa, Artificial Sequence
  chloroplast transit peptide
MASMISSSAVTTVSRASRGQSAAMAPFGGLKSMTGFPVRKVNTDITSITSNGGRVKCMQVWPPIGKKKFETLSYLPPLTRDSRA

SEQ ID NO: 39968 - protein, 85 aa, Artificial Sequence
  chloroplast transit peptide
MASSMLSSATMVASPAQATMVAPFNGLKSSAAFPATRKANNDITSITSNGGRVNCMQVWPPIEKKKFETLSYLPDLTDSGGRVNC

SEQ ID NO: 39969 - protein, 76 aa, Artificial Sequence
  chloroplast transit peptide
MAQVSRICNGVQNPSLISNLSKSSQRKSPLSVSLKTQQHPRAYPISSSWGLKKSGMTLIGSELRPLKVMSSVSTAC

SEQ ID NO: 39970 - protein, 76 aa, Artificial Sequence
  chloroplast transit peptide
MAQVSRICNGVWNPSLISNLSKSSQRKSPLSVSLKTQQHPRAYPISSSWGLKKSGMTLIGSELRPLKVMSSVSTAC

SEQ ID NO: 39971 - protein, 72 aa, Artificial Sequence
  chloroplast transit peptide
MAQINNMAQGIQTLNPNSNFHKPQVPKSSSFLVFGSKKLKNSANSMLVLKKDSIFMQLFCSFRISASVATAC

SEQ ID NO: 39972 - protein, 69 aa, Artificial Sequence
  chloroplast transit peptide
MAALVTSQLATSGTVLSVTDRFRRPGFQGLRPRNPADAALGMRTVGASAAPKQSRKPHRFDRRCLSMVV

SEQ ID NO: 39973 - protein, 77 aa, Artificial Sequence
  chloroplast transit peptide
MAALTTSQLATSATGFGIADRSAPSSLLRHGFQGLKPRSPAGGDATSLSVTTSARATPKQQRSVQRGSRRFPSVVVC

SEQ ID NO: 39974 - protein, 57 aa, Artificial Sequence
  chloroplast transit peptide
MASSVLSSAAVATRSNVAQANMVAPFTGLKSAASFPVSRKQNLDITSIASNGGRVQC

SEQ ID NO: 39975 - protein, 65 aa, Artificial Sequence
  chloroplast transit peptide
MESLAATSVFAPSRVAVPAARALVRAGTVVPTRRTSSTSGTSGVKCSAAVTPQASPVISRSAAAA

SEQ ID NO: 39976 - protein, 72 aa, Artificial Sequence
  chloroplast transit peptide
MGAAATSMQSLKFSNRLVPPSRRLSPVPNNVTCNNLPKSAAPVRTVKCCASSWNSTINGAAATTNGASAASS

SEQ ID NO: 39977 - protein, 20 aa, Artificial Sequence
  endosomal escape peptide
  SITE (4)..(4): Xaa is Lys, His or Arg
  SITE (8)..(8): Xaa is Lys, His or Arg
  SITE (11)..(11): Xaa is Lys, His or Arg
  SITE (15)..(15): Xaa is Lys, His or Arg
  SITE (19)..(19): Xaa is Lys, His or Arg
GLFXALLXLLXSLWXLLLXA

SEQ ID NO: 39978 - protein, 20 aa, Artificial Sequence
  endosomal escape peptide
GLFHALLHLLHSLWHLLLHA

SEQ ID NO: 39979 - protein, 9 aa, Artificial Sequence
  endosomal escape peptide
HHHHHHHHH

SEQ ID NO: 39980 - protein, 57 aa, Artificial Sequence
  chloroplast transit peptide
MASMISSSAVTTVSRASRGQSAAMAPFGGLKSMTGFPVRKVNTDITSITSNGGRVKS

SEQ ID NO: 39981 - RNA, 97 nt, Artificial Sequence
  CasX scaffold variant
acuggcacuuuuaucugauuacuuugagagccaucaccagcgacuaugucguauggguaaagcgcuuacggacuucgguccguaagaagcaucaaag

SEQ ID NO: 39982 - RNA, 97 nt, Artificial Sequence
  CasX scaffold variant
acuggcacuucuaucugauuacucugagagccaucaccagcgacuaugucguauggguaaagcgcuuacggacuucgguccguaagaagcaucagag

SEQ ID NO: 39983 - RNA, 98 nt, Artificial Sequence
  CasX scaffold variant
acuggcgcuucuaucugauuacucugagagccaucaccagcgacuaugucguauggguaaagccgcuuacggacuucgguccguaagaggcaucagag

SEQ ID NO: 39984 - RNA, 98 nt, Artificial Sequence
  CasX scaffold variant
acuggcacuucuaucugauuacucugagcgccaucaccagcgacuaugucguauggguaaagccgcuuacggacuucgguccguaagaggcaucagag

SEQ ID NO: 39985 - RNA, 98 nt, Artificial Sequence
  CasX scaffold variant
acuggcgcuucuaucugauuacucugagcgccaucaccagcgacuaugucguauggguaaagccgcuuacggacuucgguccguaagaggcaucagag

SEQ ID NO: 39986 - RNA, 98 nt, Artificial Sequence
  CasX scaffold variant
acuggcgcuucuaucugauuacucugagcgccaucaccagcgacuaugucguauggguaaagcgccuuacggacuucgguccguaaggagcaucagag

SEQ ID NO: 39987 - RNA, 99 nt, Artificial Sequence
  CasX scaffold variant
acuggcgcuucuaucugauuacucugagcgccaucaccagcgacuaugucguaguggguaaagccgcuuacggacuucgguccguaagaggcaucagag

SEQ ID NO: 39988 - RNA, 98 nt, Artificial Sequence
  CasX scaffold variant
acgggacuuucuaucugauuacucugaagucccucaccagcgacuaugucguauggguaaagccgcuuacggacuucgguccguaagaggcaucagag

SEQ ID NO: 39989 - RNA, 98 nt, Artificial Sequence
  CasX scaffold variant
accuguaguucuaucugauuacucugacuacagucaccagcgacuaugucguauggguaaagccgcuuacggacuucgguccguaagaggcaucagag

SEQ ID NO: 39990 - RNA, 113 nt, Artificial Sequence
  CasX scaffold variant
acuggcgcuuuuaucugauuacuuugagagccaucaccagcgacuaugucguaguggguaaagcugcacggugggcgcagcuucggcugacgguacaccgugcagcaucaaag

SEQ ID NO: 39991 - RNA, 143 nt, Artificial Sequence
  CasX scaffold variant
acuggcgcuuuuaucugauuacuuugagagccaucaccagcgacuaugucguaguggguaaagcugcacggugggcgcagcuucggcugacgguacaccggugggcgcagcuucggcugacgguacaccgugcagcaucaaag

SEQ ID NO: 39992 - RNA, 173 nt, Artificial Sequence
  CasX scaffold variant
acuggcgcuuuuaucugauuacuuugagagccaucaccagcgacuaugucguaguggguaaagcugcacggugggcgcagcuucggcugacgguacaccggugggcgcagcuucggcugacgguacaccggugggcgcagcuucggcugacgguacaccgugcagcaucaaag

SEQ ID NO: 39993 - RNA, 203 nt, Artificial Sequence
  CasX scaffold variant
acuggcgcuuuuaucugauuacuuugagagccaucaccagcgacuaugucguaguggguaaagcugcacggugggcgcagcuucggcugacgguacaccggugggcgcagcuucggcugacgguacaccggugggcgcagcuucggcugacgguacaccggugggcgcagcuucggcugacgguacaccgugcagcaucaaag

SEQ ID NO: 39994 - RNA, 233 nt, Artificial Sequence
  CasX scaffold variant
acuggcgcuuuuaucugauuacuuugagagccaucaccagcgacuaugucguaguggguaaagcugcacggugggcgcagcuucggcugacgguacaccggugggcgcagcuucggcugacgguacaccggugggcgcagcuucggcugacgguacaccggugggcgcagcuucggcugacgguacaccggugggcgcagcuucggcugacgguacaccgugcagcaucaaag

SEQ ID NO: 39995 - RNA, 97 nt, Artificial Sequence
  CasX scaffold variant
acuggcgcuuuuaucugauuacuuugagagccaucaccagcgacuaugucguaguggguaaagcugcaccuagcggaggcuaggugcagcaucaaag

SEQ ID NO: 39996 - RNA, 118 nt, Artificial Sequence
  CasX scaffold variant
acuggcgcuuuuaucugauuacuuugagagccaucaccagcgacuaugucguaguggguaaagcugcaccucggcuugcugaagcgcgcacggcaagaggcgaggugcagcaucaaag

SEQ ID NO: 39997 - RNA, 192 nt, Artificial Sequence
  CasX scaffold variant
acuggcgcuuuuaucugauuacuuugagagccaucaccagcgacuaugucguaguggguaaagcugcaccucucucgacgcaggacucggcuugcugaagcgcgcacggcaagaggcgaggggcggcgacuggugaguacgccaaaaauuuugacuagcggaggcuagaaggagagaggugcagcaucaaag

SEQ ID NO: 39998 - RNA, 156 nt, Artificial Sequence
  CasX scaffold variant
acuggcgcuuuuaucugauuacuuugagagccaucaccagcgacuaugucguaguggguaaagcugcacggugcccgucuguugugucgagagacgccaaaaauuuugacuagcggaggcuagaaggagagagaugggugccgugcagcaucaaag

SEQ ID NO: 39999 - RNA, 96 nt, Artificial Sequence
  CasX scaffold variant
acuggcgcuuuuaucugauuacuuugagagccaucaccagcgacuaugucguaguggguaaagcugcacauggagaggagaugugcagcaucaaag

SEQ ID NO: 40000 - RNA, 91 nt, Artificial Sequence
  CasX scaffold variant
acuggcgcuuuuaucugauuacuuugagagccaucaccagcgacuaugucguaguggguaaagcugcacauggagaugugcagcaucaaag

SEQ ID NO: 40001 - RNA, 106 nt, Artificial Sequence
  CasX scaffold variant
acuggcgcuuuuaucugauuacuuugagagccaucaccagcgacuaugucguaguggguaaagcuugggcgcagcgucaaugacgcugacgguacaagcaucaaag

SEQ ID NO: 40002 - RNA, 145 nt, Artificial Sequence
  CasX scaffold variant
acuggcgcuuuuaucugauuacuuugagagccaucaccagcgacuaugucguaguggguaaagcugcacuaugggcgcagcgucaaugacgcugacgguacaggccacaugaggaucacccaugugguauagugcagcaucaaag

SEQ ID NO: 40003 - RNA, 155 nt, Artificial Sequence
  CasX scaffold variant
acuggcgcuuuuaucugauuacuuugagagccaucaccagcgacuaugucguaguggguaaagcugcacuaugggcgcagcucaugaggaucacccaugagcugacgguacaggccacaugaggaucacccaugugguauagugcagcaucaaag

SEQ ID NO: 40004 - RNA, 151 nt, Artificial Sequence
  CasX scaffold variant
acuggcgcuuuuaucugauuacuuugagagccaucaccagcgacuaugucguaguggguaaagcugcacuaugggcgcagcgucaaugacgcugacgguacaggccacauggcagucguaacgacgcgggugguauagugcagcaucaaag

SEQ ID NO: 40005 - RNA, 172 nt, Artificial Sequence
  CasX scaffold variant
acuggcgcuuuuaucugauuacuuugagagccaucaccagcgacuaugucguaguggguaaagcugcacuaugggcgcagcaaacauggcaguccuaaggacgcggguuuugcugacgguacaggccacauggcagucguaacgacgcgggugguauagugcagcaucaaag

SEQ ID NO: 40006 - RNA, 159 nt, Artificial Sequence
  CasX scaffold variant
acuggcgcuuuuaucugauuacuuugagagccaucaccagcgacuaugucguaguggguaaagcugcacuaugggcgcagacauggcagucguaacgacgcgggucugacgguacaggccacaugaggaucacccaugugguauagugcagcaucaaag

SEQ ID NO: 40007 - RNA, 108 nt, Artificial Sequence
  CasX scaffold variant
acuggcgcuuuuaucugauuacuuugagagccaucaccagcgacuaugucguaguggguaaagcugcacuaaggaguuuauauggaaacccuuagugcagcaucaaag

SEQ ID NO: 40008 - RNA, 242 nt, Artificial Sequence
  CasX scaffold variant
acuggcgcuuuuaucugauuacuuugagagccaucaccagcgacuaugucguaguggguaaagcucaggaagcacuaugggcgcagcgucaaugacgcugacgguacaggccagacaauuauugucugguauagugcagcagcagaacaauuugcugagggcuauugaggcgcaacagcaucuguugcaacucacagucuggggcaucaagcagcuccaggcaagaauccugagcaucaaag

SEQ ID NO: 40009 - RNA, 98 nt, Artificial Sequence
  CasX scaffold variant
acuggcgcuuuuaucugauuacuuugagagccaucaccagcgacuaugucguaguggguaaagcugcacgcccugaagaagggcgugcagcaucaaag

SEQ ID NO: 40010 - RNA, 111 nt, Artificial Sequence
  CasX scaffold variant
acuggcgcuuuuaucugauuacuuugagagccaucaccagcgacuaugucguaguggguaaagcugcacggcucguguagcucauuagcuccgagccgugcagcaucaaag

SEQ ID NO: 40011 - RNA, 113 nt, Artificial Sequence
  CasX scaffold variant
acuggcgcuuuuaucugauuacuuugagagccaucaccagcgacuaugucguaguggguaaagcugcacccgugugcauccgcagugucggauccacgggugcagcaucaaag

SEQ ID NO: 40012 - RNA, 112 nt, Artificial Sequence
  CasX scaffold variant
acuggcgcuuuuaucugauuacuuugagagccaucaccagcgacuaugucguaguggguaaagcugcacggaauccauugcacuccggauuucacuaggugcagcaucaaag

SEQ ID NO: 40013 - RNA, 103 nt, Artificial Sequence
  CasX scaffold variant
acuggcgcuuuuaucugauuacuuugagagccaucaccagcgacuaugucguaguggguaaagcugcacaugcaugucuaagacagcaugugcagcaucaaag

SEQ ID NO: 40014 - RNA, 106 nt, Artificial Sequence
  CasX scaffold variant
acuggcgcuuuuaucugauuacuuugagagccaucaccagcgacuaugucguaguggguaaagcugcacaaaacauaaggaaaaccuauguugugcagcaucaaag

SEQ ID NO: 40015 - RNA, 153 nt, Artificial Sequence
  CasX scaffold variant
acuggcgcuucuaucugauuacucugagcgccaucaccagcgacuaugucguaguggguaaagccgcuuacggacuaugggcgcagcgucaaugacgcugacgguacaggccagacaauuauugucugguauaguccguaagaggcaucagag

SEQ ID NO: 40016 - RNA, 147 nt, Artificial Sequence
  CasX scaffold variant
acuggcgcuucuaucugauuacucugagcgccaucaccagcgacuaugucguaguggguaaagccgcuuacgggugggcgcagcgucaaugacgcugacgguacaggccagacaauuauugucugguacccguaagaggcaucagag

SEQ ID NO: 40017 - RNA, 153 nt, Artificial Sequence
  CasX scaffold variant
acuggcgcuucuaucugauuacucugagcgccaucaccagcgacuaugucguaguggguaaagccgcuuacgguaugggcgcagcgucaaugacgcugacgguacaggccacaugaggaucacccaugugguauaccguaagaggcaucagag

SEQ ID NO: 40018 - RNA, 143 nt, Artificial Sequence
  CasX scaffold variant
acuggcgcuuuuaucugauuacuuugagagccaucaccagcgacuaugucguaguggguaaagcucccuaugggcgcagcgucaaugacgcugacgguacaggccacaugaggaucacccaugugguauagggagcaucaaag

SEQ ID NO: 40019 - RNA, 163 nt, Artificial Sequence
  CasX scaffold variant
acuggcgcuucuaucugauuacucugagcgccaucaccagcgacuaugucguaguggguaaagccgcuuacgguaugggcgcagcucaugaggaucacccaugagcugacgguacaggccacaugaggaucacccaugugguauaccguaagaggcaucagag

SEQ ID NO: 40020 - RNA, 153 nt, Artificial Sequence
  CasX scaffold variant
acuggcgcuuuuaucugauuacuuugagagccaucaccagcgacuaugucguaguggguaaagcucccuaugggcgcagcucaugaggaucacccaugagcugacgguacaggccacaugaggaucacccaugugguauagggagcaucaaag

SEQ ID NO: 40021 - RNA, 159 nt, Artificial Sequence
  CasX scaffold variant
acuggcgcuucuaucugauuacucugagcgccaucaccagcgacuaugucguaguggguaaagccgcuuacgguaugggcgcagcgucaaugacgcugacgguacaggccacauggcagucguaacgacgcgggugguauaccguaagaggcaucagag

SEQ ID NO: 40022 - RNA, 149 nt, Artificial Sequence
  CasX scaffold variant
acuggcgcuuuuaucugauuacuuugagagccaucaccagcgacuaugucguaguggguaaagcucccuaugggcgcagcgucaaugacgcugacgguacaggccacauggcagucguaacgacgcgggugguauagggagcaucaaag

SEQ ID NO: 40023 - RNA, 180 nt, Artificial Sequence
  CasX scaffold variant
acuggcgcuucuaucugauuacucugagcgccaucaccagcgacuaugucguaguggguaaagccgcuuacgguaugggcgcagcaaacauggcaguccuaaggacgcggguuuugcugacgguacaggccacauggcagucguaacgacgcgggugguauaccguaagaggcaucagag

SEQ ID NO: 40024 - RNA, 170 nt, Artificial Sequence
  CasX scaffold variant
acuggcgcuuuuaucugauuacuuugagagccaucaccagcgacuaugucguaguggguaaagcucccuaugggcgcagcaaacauggcaguccuaaggacgcggguuuugcugacgguacaggccacauggcagucguaacgacgcgggugguauagggagcaucaaag

SEQ ID NO: 40025 - RNA, 167 nt, Artificial Sequence
  CasX scaffold variant
acuggcgcuucuaucugauuacucugagcgccaucaccagcgacuaugucguaguggguaaagccgcuuacgguaugggcgcagacauggcagucguaacgacgcgggucugacgguacaggccacaugaggaucacccaugugguauaccguaagaggcaucagag

SEQ ID NO: 40026 - RNA, 157 nt, Artificial Sequence
  CasX scaffold variant
acuggcgcuuuuaucugauuacuuugagagccaucaccagcgacuaugucguaguggguaaagcucccuaugggcgcagacauggcagucguaacgacgcgggucugacgguacaggccacaugaggaucacccaugugguauagggagcaucaaag

SEQ ID NO: 40027 - protein, 979 aa, Artificial Sequence
  CasX variant
QEIKRINKIRRRLVKDSNTKKAGKTRGPMKTLLVRVMTPDLRERLENLRKKPENIPQPISNTSRANLNKLLTDYTEMKKAILHVYWEEFQKDPVGLMSRVAQPASKKIDQNKLKPEMDEKGNLTTAGFACSQCGQPLFVYKLEQVSEKGKAYTNYFGRCNVAEHEKLILLAQLKPEKDSDEAVTYSLGKFGQRALDFYSIHVTKESTHPVKPLAQIAGNRYASGPVGKALSDACMGTIASFLSKYQDIIIEHQKVVKGNQKRLESLRELAGKENLEYPSVTLPPQPHTKEGVDAYNEVIARVRMWVNLNLWQKLKLSRDDAKPLLRLKGFPSFPLVERQANEVDWWDMVCNVKKLINEKKEDGKVFWQNLAGYKRQEALRPYLSSEEDRKKGKKFARYQLGDLLLHLEKKHGEDWGKVYDEAWERIDKKVEGLSKHIKLEEERRSEDAQSKAALTDWLRAKASFVIEGLKEADKDEFCRCELKLQKWYGDLRGKPFAIEAENSILDISGFSKQYNCAFIWQKDGVKKLNLYLIINYFKGGKLRFKKIKPEAFEANRFYTVINKKSGEIVPMEVNFNFDDPNLIILPLAFGKRQGREFIWNDLLSLETGSLKLANGRVIEKTLYNRRTRQDEPALFVALTFERREVLDSSNIKPMNLIGVDRGENIPAVIALTDPEGCPLSRFKDSLGNPTHILRIGESYKEKQRTIQAKKEVEQRRAGGYSRKYASKAKNLADDMVRNTARDLLYYAVTQDAMLIFENLSRGFGRQGKRTFMAERQYTRMEDWLTAKLAYEGLPSKTYLSKTLAQYTSKTCSNCGFTITSADYDRVLEKLKKTATGWMTTINGKELKVEGQITYYNRYKRQNVVKDLSVELDRLSEESVNNDISSWTKGRSGEALSLLKKRFSHRPVQEKFVCLNCGFETHADEQAALNIARSWLFLRSQEYKKYQTNKTTGNTDKRAFVETWQSFYRKKLKEVWKPAV

SEQ ID NO: 40028 - protein, 979 aa, Artificial Sequence
  CasX variant
QEIKRINKIRRRLVKDSNTKKAGKTRGPMKTLLVRVMTPDLRERLENLRKKPENIPQPISNTSRANLNKLLTDYTEMKKAILHVYWEEFQKDPVGLMSRVAQPASKKIDQNKLKPEMDEKGNLTTAGFACSQCGQPLFVYKLEQVSEKGKAYTNYFGRCNVAEHEKLILLAQLKPEKDSDEAVTYSLGKFGQRALDFYSIHVTKESTHPVKPLAQIAGNRYASYPVGKALSDACMGTIASFLSKYQDIIIEHQKVVKGNQKRLESLRELAGKENLEYPSVTLPPQPHTKEGVDAYNEVIARVRMWVNLNLWQKLKLSRDDAKPLLRLKGFPSFPLVERQANEVDWWDMVCNVKKLINEKKEDGKVFWQNLAGYKRQEALRPYLSSEEDRKKGKKFARYQLGDLLLHLEKKHGEDWGKVYDEAWERIDKKVEGLSKHIKLEEERRSEDAQSKAALTDWLRAKASFVIEGLKEADKDEFCRCELKLQKWYGDLRGKPFAIEAENSILDISGFSKQYNCAFIWQKDGVKKLNLYLIINYFKGGKLRFKKIKPEAFEANRFYTVINKKSGEIVPMEVNFNFDDPNLIILPLAFGKRQGREFIWNDLLSLETGSLKLANGRVIEKTLYNRRTRQDEPALFVALTFERREVLDSSNIKPMNLIGVDRGENIPAVIALTDPEGCPLSRFKDSLGNPTHILRIGESYKEKQRTIQAKKEVEQRRAGGYSRKYASKAKNLADDMVRNTARDLLYYAVTQDAMLIFENLSRGFGRQGKRTFMAERQYTRMEDWLTAKLAYEGLPSKTYLSKTLAQYTSKTCSNCGFTITSADYDRVLEKLKKTATGWMTTINGKELKVEGQITYYNRYKRQNVVKDLSVELDRLSEESVNNDISSWTKGRSGEALSLLKKRFSHRPVQEKFVCLNCGFETHADEQAALNIARSWLFLRSQEYKKYQTNKTTGNTDKRAFVETWQSFYRKKLKEVWKPAV

SEQ ID NO: 40029 - protein, 979 aa, Artificial Sequence; identical to SEQ ID NO: 40028
  CasX variant

SEQ ID NO: 40030 - protein, 978 aa, Artificial Sequence
  CasX variant
QEIKRINKIRRRLVKDSNTKKAGKTGPMKTLLVRVMTPDLRERLENLRKKPENIPQPISNTSRANLNKLLTDYTEMKKAILHVYWEEFQKDPVGLMSRVAQPASKKIDQNKLKPEMDEKGNLTTAGFACSQCGQPLFVYKLEQVSEKGKAYTNYFGRCNVAEHEKLILLAQLKPEKDSDEAVTYSLGKFGQRALDFYSIHVTKESTHPVKPLAQIAGNRYASSPVGKALSDACMGTIASFLSKYQDIIIEHQKVVKGNQKRLESLRELAGKENLEYPSVTLPPQPHTKEGVDAYNEVIARVRMWVNLNLWQKLKLSRDDAKPLLRLKGFPSFPLVERQANEVDWWDMVCNVKKLINEKKEDGKVFWQNLAGYKRQEALRPYLSSEEDRKKGKKFARYQLGDLLLHLEKKHGEDWGKVYDEAWERIDKKVEGLSKHIKLEEERRSEDAQSKAALTDWLRAKASFVIEGLKEADKDEFCRCELKLQKWYGDLRGKPFAIEAENSILDISGFSKQYNCAFIWQKDGVKKLNLYLIINYFKGGKLRFKKIKPEAFEANRFYTVINKKSGEIVPMEVNFNFDDPNLIILPLAFGKRQGREFIWNDLLSLETGSLKLANGRVIEKTLYNRRTRQDEPALFVALTFERREVLDSSNIKPMNLIGVDRGENIPAVIALTDPEGCPLSRFKDSLGNPTHILRIGESYKEKQRTIQAKKEVEQRRAGGYSRKYASKAKNLADDMVRNTARDLLYYAVTQDAMLIFENLSRGFGRQGKRTFMAERQYTRMEDWLTAKLAYEGLPSKTYLSKTLAQYTSKTCSNCGFTITSADYDRVLEKLKKTATGWMTTINGKELKVEGQITYYNRYKRQNVVKDLSVELDRLSEESVNNDISSWTKGRSGEALSLLKKRFSHRPVQEKFVCLNCGFETHADEQAALNIARSWLFLRSQEYKKYQTNKTTGNTDKRAFVETWQSFYRKKLKEVWKPAV

SEQ ID NO: 40031 - protein, 978 aa, Artificial Sequence
  CasX variant
QEIKRINKIRRRLVKDSNTKKAGKTGPMKTLLVRVMTPDLRERLENLRKKPENIPQPISNTSRANLNKLLTDYTEMKKAILHVYWEEFQKDPVGLMSRVAQPASKKIDQNKLKPEMDEKGNLTTAGFACSQCGQPLFVYKLEQVSEKGKAYTNYFGRCNVAEHEKLILLAQLKPEKDSDEAVTYSLGKFGQRALDFYSIHVTKESTHPVKPLAQIAGNRYASTPVGKALSDACMGTIASFLSKYQDIIIEHQKVVKGNQKRLESLRELAGKENLEYPSVTLPPQPHTKEGVDAYNEVIARVRMWVNLNLWQKLKLSRDDAKPLLRLKGFPSFPLVERQANEVDWWDMVCNVKKLINEKKEDGKVFWQNLAGYKRQEALRPYLSSEEDRKKGKKFARYQLGDLLLHLEKKHGEDWGKVYDEAWERIDKKVEGLSKHIKLEEERRSEDAQSKAALTDWLRAKASFVIEGLKEADKDEFCRCELKLQKWYGDLRGKPFAIEAENSILDISGFSKQYNCAFIWQKDGVKKLNLYLIINYFKGGKLRFKKIKPEAFEANRFYTVINKKSGEIVPMEVNFNFDDPNLIILPLAFGKRQGREFIWNDLLSLETGSLKLANGRVIEKTLYNRRTRQDEPALFVALTFERREVLDSSNIKPMNLIGVDRGENIPAVIALTDPEGCPLSRFKDSLGNPTHILRIGESYKEKQRTIQAKKEVEQRRAGGYSRKYASKAKNLADDMVRNTARDLLYYAVTQDAMLIFENLSRGFGRQGKRTFMAERQYTRMEDWLTAKLAYEGLPSKTYLSKTLAQYTSKTCSNCGFTITSADYDRVLEKLKKTATGWMTTINGKELKVEGQITYYNRYKRQNVVKDLSVELDRLSEESVNNDISSWTKGRSGEALSLLKKRFSHRPVQEKFVCLNCGFETHADEQAALNIARSWLFLRSQEYKKYQTNKTTGNTDKRAFVETWQSFYRKKLKEVWKPAV

SEQ ID NO: 40032 - protein, 978 aa, Artificial Sequence
  CasX variant
QEIKRINKIRRRLVKDSNTKKAGKTGPMKTLLVRVMTPDLRERLENLRKKPENIPQPISNTSRANLNKLLTDYTEMKKAILHVYWEEFQKDPVGLMSRVAQPASKKIDQNKLKPEMDEKGNLTTAGFACSQCGQPLFVYKLEQVSEKGKAYTNYFGRCNVAEHEKLILLAQLKPEKDSDEAVTYSLGKFGQRALDFYSIHVTKESTHPVKPLAQIAGNRYASAPVGKALSDACMGTIASFLSKYQDIIIEHQKVVKGNQKRLESLRELAGKENLEYPSVTLPPQPHTKEGVDAYNEVIARVRMWVNLNLWQKLKLSRDDAKPLLRLKGFPSFPLVERQANEVDWWDMVCNVKKLINEKKEDGKVFWQNLAGYKRQEALRPYLSSEEDRKKGKKFARYQLGDLLLHLEKKHGEDWGKVYDEAWERIDKKVEGLSKHIKLEEERRSEDAQSKAALTDWLRAKASFVIEGLKEADKDEFCRCELKLQKWYGDLRGKPFAIEAENSILDISGFSKQYNCAFIWQKDGVKKLNLYLIINYFKGGKLRFKKIKPEAFEANRFYTVINKKSGEIVPMEVNFNFDDPNLIILPLAFGKRQGREFIWNDLLSLETGSLKLANGRVIEKTLYNRRTRQDEPALFVALTFERREVLDSSNIKPMNLIGVDRGENIPAVIALTDPEGCPLSRFKDSLGNPTHILRIGESYKEKQRTIQAKKEVEQRRAGGYSRKYASKAKNLADDMVRNTARDLLYYAVTQDAMLIFENLSRGFGRQGKRTFMAERQYTRMEDWLTAKLAYEGLPSKTYLSKTLAQYTSKTCSNCGFTITSADYDRVLEKLKKTATGWMTTINGKELKVEGQITYYNRYKRQNVVKDLSVELDRLSEESVNNDISSWTKGRSGEALSLLKKRFSHRPVQEKFVCLNCGFETHADEQAALNIARSWLFLRSQEYKKYQTNKTTGNTDKRAFVETWQSFYRKKLKEVWKPAV

SEQ ID NO: 40033 - protein, 978 aa, Artificial Sequence
  CasX variant
QEIKRINKIRRRLVKDSNTKKAGKTGPMKTLLVRVMTPDLRERLENLRKKPENIPQPISNTSRANLNKLLTDYTEMKKAILHVYWEEFQKDPVGLMSRVAQPASKKIDQNKLKPEMDEKGNLTTAGFACSQCGQPLFVYKLEQVSEKGKAYTNYFGRCNVAEHEKLILLAQLKPEKDSDEAVTYSLGKFGQRALDFYSIHVTKESTHPVKPLAQIAGNRYASVPVGKALSDACMGTIASFLSKYQDIIIEHQKVVKGNQKRLESLRELAGKENLEYPSVTLPPQPHTKEGVDAYNEVIARVRMWVNLNLWQKLKLSRDDAKPLLRLKGFPSFPLVERQANEVDWWDMVCNVKKLINEKKEDGKVFWQNLAGYKRQEALRPYLSSEEDRKKGKKFARYQLGDLLLHLEKKHGEDWGKVYDEAWERIDKKVEGLSKHIKLEEERRSEDAQSKAALTDWLRAKASFVIEGLKEADKDEFCRCELKLQKWYGDLRGKPFAIEAENSILDISGFSKQYNCAFIWQKDGVKKLNLYLIINYFKGGKLRFKKIKPEAFEANRFYTVINKKSGEIVPMEVNFNFDDPNLIILPLAFGKRQGREFIWNDLLSLETGSLKLANGRVIEKTLYNRRTRQDEPALFVALTFERREVLDSSNIKPMNLIGVDRGENIPAVIALTDPEGCPLSRFKDSLGNPTHILRIGESYKEKQRTIQAKKEVEQRRAGGYSRKYASKAKNLADDMVRNTARDLLYYAVTQDAMLIFENLSRGFGRQGKRTFMAERQYTRMEDWLTAKLAYEGLPSKTYLSKTLAQYTSKTCSNCGFTITSADYDRVLEKLKKTATGWMTTINGKELKVEGQITYYNRYKRQNVVKDLSVELDRLSEESVNNDISSWTKGRSGEALSLLKKRFSHRPVQEKFVCLNCGFETHADEQAALNIARSWLFLRSQEYKKYQTNKTTGNTDKRAFVETWQSFYRKKLKEVWKPAV

SEQ ID NO: 40034 - protein, 978 aa, Artificial Sequence
  CasX variant
QEIKRINKIRRRLVKDSNTKKAGKTGPMKTLLVRVMTPDLRERLENLRKKPENIPQPISNTSRANLNKLLTDYTEMKKAILHVYWEEFQKDPVGLMSRVAQPASKKIDQNKLKPEMDEKGNLTTAGFACSQCGQPLFVYKLEQVSEKGKAYTNYFGRCNVAEHEKLILLAQLKPEKDSDEAVTYSLGKFGQRALDFYSIHVTKESTHPVKPLAQIAGNRYASGPVGKALSLACMGTIASFLSKYQDIIIEHQKVVKGNQKRLESLRELAGKENLEYPSVTLPPQPHTKEGVDAYNEVIARVRMWVNLNLWQKLKLSRDDAKPLLRLKGFPSFPLVERQANEVDWWDMVCNVKKLINEKKEDGKVFWQNLAGYKRQEALRPYLSSEEDRKKGKKFARYQLGDLLLHLEKKHGEDWGKVYDEAWERIDKKVEGLSKHIKLEEERRSEDAQSKAALTDWLRAKASFVIEGLKEADKDEFCRCELKLQKWYGDLRGKPFAIEAENSILDISGFSKQYNCAFIWQKDGVKKLNLYLIINYFKGGKLRFKKIKPEAFEANRFYTVINKKSGEIVPMEVNFNFDDPNLIILPLAFGKRQGREFIWNDLLSLETGSLKLANGRVIEKTLYNRRTRQDEPALFVALTFERREVLDSSNIKPMNLIGVDRGENIPAVIALTDPEGCPLSRFKDSLGNPTHILRIGESYKEKQRTIQAKKEVEQRRAGGYSRKYASKAKNLADDMVRNTARDLLYYAVTQDAMLIFENLSRGFGRQGKRTFMAERQYTRMEDWLTAKLAYEGLPSKTYLSKTLAQYTSKTCSNCGFTITSADYDRVLEKLKKTATGWMTTINGKELKVEGQITYYNRYKRQNVVKDLSVELDRLSEESVNNDISSWTKGRSGEALSLLKKRFSHRPVQEKFVCLNCGFETHADEQAALNIARSWLFLRSQEYKKYQTNKTTGNTDKRAFVETWQSFYRKKLKEVWKPAV

SEQ ID NO: 40035 - protein, 978 aa, Artificial Sequence
  CasX variant
QEIKRINKIRRRLVKDSNTKKAGKTGPMKTLLVRVMTPDLRERLENLRKKPENIPQPISNTSRANLNKLLTDYTEMKKAILHVYWEEFQKDPVGLMSRVAQPASKKIDQNKLKPEMDEKGNLTTAGFACSQCGQPLFVYKLEQVSEKGKAYTNYFGRCNVAEHEKLILLAQLKPEKDSDEAVTYSLGKFGQRALDFYSIHVTKESTHPVKPLAQIAGNRYASGPVGKALSNACMGTIASFLSKYQDIIIEHQKVVKGNQKRLESLRELAGKENLEYPSVTLPPQPHTKEGVDAYNEVIARVRMWVNLNLWQKLKLSRDDAKPLLRLKGFPSFPLVERQANEVDWWDMVCNVKKLINEKKEDGKVFWQNLAGYKRQEALRPYLSSEEDRKKGKKFARYQLGDLLLHLEKKHGEDWGKVYDEAWERIDKKVEGLSKHIKLEEERRSEDAQSKAALTDWLRAKASFVIEGLKEADKDEFCRCELKLQKWYGDLRGKPFAIEAENSILDISGFSKQYNCAFIWQKDGVKKLNLYLIINYFKGGKLRFKKIKPEAFEANRFYTVINKKSGEIVPMEVNFNFDDPNLIILPLAFGKRQGREFIWNDLLSLETGSLKLANGRVIEKTLYNRRTRQDEPALFVALTFERREVLDSSNIKPMNLIGVDRGENIPAVIALTDPEGCPLSRFKDSLGNPTHILRIGESYKEKQRTIQAKKEVEQRRAGGYSRKYASKAKNLADDMVRNTARDLLYYAVTQDAMLIFENLSRGFGRQGKRTFMAERQYTRMEDWLTAKLAYEGLPSKTYLSKTLAQYTSKTCSNCGFTITSADYDRVLEKLKKTATGWMTTINGKELKVEGQITYYNRYKRQNVVKDLSVELDRLSEESVNNDISSWTKGRSGEALSLLKKRFSHRPVQEKFVCLNCGFETHADEQAALNIARSWLFLRSQEYKKYQTNKTTGNTDKRAFVETWQSFYRKKLKEVWKPAV

SEQ ID NO: 40036 - protein, 978 aa, Artificial Sequence
  CasX variant
QEIKRINKIRRRLVKDSNTKKAGKTGPMKTLLVRVMTPDLRERLENLRKKPENIPQPISNTSRANLNKLLTDYTEMKKAILHVYWEEFQKDPVGLMSRVAQPASKKIDQNKLKPEMDEKGNLTTAGFACSQCGQPLFVYKLEQVSEKGKAYTNYFGRCNVAEHEKLILLAQLKPEKDSDEAVTYSLGKFGQRALDFYSIHVTKESTHPVKPLAQIAGNRYASGPVGKALSQACMGTIASFLSKYQDIIIEHQKVVKGNQKRLESLRELAGKENLEYPSVTLPPQPHTKEGVDAYNEVIARVRMWVNLNLWQKLKLSRDDAKPLLRLKGFPSFPLVERQANEVDWWDMVCNVKKLINEKKEDGKVFWQNLAGYKRQEALRPYLSSEEDRKKGKKFARYQLGDLLLHLEKKHGEDWGKVYDEAWERIDKKVEGLSKHIKLEEERRSEDAQSKAALTDWLRAKASFVIEGLKEADKDEFCRCELKLQKWYGDLRGKPFAIEAENSILDISGFSKQYNCAFIWQKDGVKKLNLYLIINYFKGGKLRFKKIKPEAFEANRFYTVINKKSGEIVPMEVNFNFDDPNLIILPLAFGKRQGREFIWNDLLSLETGSLKLANGRVIEKTLYNRRTRQDEPALFVALTFERREVLDSSNIKPMNLIGVDRGENIPAVIALTDPEGCPLSRFKDSLGNPTHILRIGESYKEKQRTIQAKKEVEQRRAGGYSRKYASKAKNLADDMVRNTARDLLYYAVTQDAMLIFENLSRGFGRQGKRTFMAERQYTRMEDWLTAKLAYEGLPSKTYLSKTLAQYTSKTCSNCGFTITSADYDRVLEKLKKTATGWMTTINGKELKVEGQITYYNRYKRQNVVKDLSVELDRLSEESVNNDISSWTKGRSGEALSLLKKRFSHRPVQEKFVCLNCGFETHADEQAALNIARSWLFLRSQEYKKYQTNKTTGNTDKRAFVETWQSFYRKKLKEVWKPAV

SEQ ID NO: 40037 - protein, 978 aa, Artificial Sequence
  CasX variant
QEIKRINKIRRRLVKDSNTKKAGKTGPMKTLLVRVMTPDLRERLENLRKKPENIPQPISNTSRANLNKLLTDYTEMKKAILHVYWEEFQKDPVGLMSRVAQPASKKIDQNKLKPEMDEKGNLTTAGFACSQCGQPLFVYKLEQVSEKGKAYTNYFGRCNVAEHEKLILLAQLKPEKDSDEAVTYSLGKFGQRALDFYSIHVTKESTHPVKPLAQIAGNRYASGPVGKALSSACMGTIASFLSKYQDIIIEHQKVVKGNQKRLESLRELAGKENLEYPSVTLPPQPHTKEGVDAYNEVIARVRMWVNLNLWQKLKLSRDDAKPLLRLKGFPSFPLVERQANEVDWWDMVCNVKKLINEKKEDGKVFWQNLAGYKRQEALRPYLSSEEDRKKGKKFARYQLGDLLLHLEKKHGEDWGKVYDEAWERIDKKVEGLSKHIKLEEERRSEDAQSKAALTDWLRAKASFVIEGLKEADKDEFCRCELKLQKWYGDLRGKPFAIEAENSILDISGFSKQYNCAFIWQKDGVKKLNLYLIINYFKGGKLRFKKIKPEAFEANRFYTVINKKSGEIVPMEVNFNFDDPNLIILPLAFGKRQGREFIWNDLLSLETGSLKLANGRVIEKTLYNRRTRQDEPALFVALTFERREVLDSSNIKPMNLIGVDRGENIPAVIALTDPEGCPLSRFKDSLGNPTHILRIGESYKEKQRTIQAKKEVEQRRAGGYSRKYASKAKNLADDMVRNTARDLLYYAVTQDAMLIFENLSRGFGRQGKRTFMAERQYTRMEDWLTAKLAYEGLPSKTYLSKTLAQYTSKTCSNCGFTITSADYDRVLEKLKKTATGWMTTINGKELKVEGQITYYNRYKRQNVVKDLSVELDRLSEESVNNDISSWTKGRSGEALSLLKKRFSHRPVQEKFVCLNCGFETHADEQAALNIARSWLFLRSQEYKKYQTNKTTGNTDKRAFVETWQSFYRKKLKEVWKPAV

SEQ ID NO: 40038 - protein, 978 aa, Artificial Sequence
  CasX variant
QEIKRINKIRRRLVKDSNTKKAGKTGPMKTLLVRVMTPDLRERLENLRKKPENIPQPISNTSRANLNKLLTDYTEMKKAILHVYWEEFQKDPVGLMSRVAQPASKKIDQNKLKPEMDEKGNLTTAGFACSQCGQPLFVYKLEQVSEKGKAYTNYFGRCNVAEHEKLILLAQLKPEKDSDEAVTYSLGKFGQRALDFYSIHVTKESTHPVKPLAQIAGNRYASGPVGKALSAACMGTIASFLSKYQDIIIEHQKVVKGNQKRLESLRELAGKENLEYPSVTLPPQPHTKEGVDAYNEVIARVRMWVNLNLWQKLKLSRDDAKPLLRLKGFPSFPLVERQANEVDWWDMVCNVKKLINEKKEDGKVFWQNLAGYKRQEALRPYLSSEEDRKKGKKFARYQLGDLLLHLEKKHGEDWGKVYDEAWERIDKKVEGLSKHIKLEEERRSEDAQSKAALTDWLRAKASFVIEGLKEADKDEFCRCELKLQKWYGDLRGKPFAIEAENSILDISGFSKQYNCAFIWQKDGVKKLNLYLIINYFKGGKLRFKKIKPEAFEANRFYTVINKKSGEIVPMEVNFNFDDPNLIILPLAFGKRQGREFIWNDLLSLETGSLKLANGRVIEKTLYNRRTRQDEPALFVALTFERREVLDSSNIKPMNLIGVDRGENIPAVIALTDPEGCPLSRFKDSLGNPTHILRIGESYKEKQRTIQAKKEVEQRRAGGYSRKYASKAKNLADDMVRNTARDLLYYAVTQDAMLIFENLSRGFGRQGKRTFMAERQYTRMEDWLTAKLAYEGLPSKTYLSKTLAQYTSKTCSNCGFTITSADYDRVLEKLKKTATGWMTTINGKELKVEGQITYYNRYKRQNVVKDLSVELDRLSEESVNNDISSWTKGRSGEALSLLKKRFSHRPVQEKFVCLNCGFETHADEQAALNIARSWLFLRSQEYKKYQTNKTTGNTDKRAFVETWQSFYRKKLKEVWKPAV

SEQ ID NO: 40039 - protein, 978 aa, Artificial Sequence
  CasX variant
QEIKRINKIRRRLVKDSNTKKAGKTGPMKTLLVRVMTPDLRERLENLRKKPENIPQPISNTSRANLNKLLTDYTEMKKAILHVYWEEFQKDPVGLMSRVAQPASKKIDQNKLKPEMDEKGNLTTAGFACSQCGQPLFVYKLEQVSEKGKAYTNYFGRCNVAEHEKLILLAQLKPEKDSDEAVTYSLGKFGQRALDFYSIHVTKESTHPVKPLAQIAGNRYASGPVGKALSGACMGTIASFLSKYQDIIIEHQKVVKGNQKRLESLRELAGKENLEYPSVTLPPQPHTKEGVDAYNEVIARVRMWVNLNLWQKLKLSRDDAKPLLRLKGFPSFPLVERQANEVDWWDMVCNVKKLINEKKEDGKVFWQNLAGYKRQEALRPYLSSEEDRKKGKKFARYQLGDLLLHLEKKHGEDWGKVYDEAWERIDKKVEGLSKHIKLEEERRSEDAQSKAALTDWLRAKASFVIEGLKEADKDEFCRCELKLQKWYGDLRGKPFAIEAENSILDISGFSKQYNCAFIWQKDGVKKLNLYLIINYFKGGKLRFKKIKPEAFEANRFYTVINKKSGEIVPMEVNFNFDDPNLIILPLAFGKRQGREFIWNDLLSLETGSLKLANGRVIEKTLYNRRTRQDEPALFVALTFERREVLDSSNIKPMNLIGVDRGENIPAVIALTDPEGCPLSRFKDSLGNPTHILRIGESYKEKQRTIQAKKEVEQRRAGGYSRKYASKAKNLADDMVRNTARDLLYYAVTQDAMLIFENLSRGFGRQGKRTFMAERQYTRMEDWLTAKLAYEGLPSKTYLSKTLAQYTSKTCSNCGFTITSADYDRVLEKLKKTATGWMTTINGKELKVEGQITYYNRYKRQNVVKDLSVELDRLSEESVNNDISSWTKGRSGEALSLLKKRFSHRPVQEKFVCLNCGFETHADEQAALNIARSWLFLRSQEYKKYQTNKTTGNTDKRAFVETWQSFYRKKLKEVWKPAV

SEQ ID NO: 40040 - protein, 978 aa, Artificial Sequence
  CasX variant
QEIKRINKIRRRLVKDSNTKKAGKTGPMKTLLVRVMTPDLRERLENLRKKPENIPQPISNTSRANLNKLLTDYTEMKKAILHVYWEEFQKDPVGLMSRVAQPASKKIDQNKLKPEMDEKGNLTTAGFACSQCGQPLFVYKLEQVSEKGKAYTNYFGRCNVAEHEKLILLAQLKPEKDSDEAVTYSLGKFGQRALDFYSIHVTKESTHPVKPLAQIAGNRYASGPVGKALSTACMGTIASFLSKYQDIIIEHQKVVKGNQKRLESLRELAGKENLEYPSVTLPPQPHTKEGVDAYNEVIARVRMWVNLNLWQKLKLSRDDAKPLLRLKGFPSFPLVERQANEVDWWDMVCNVKKLINEKKEDGKVFWQNLAGYKRQEALRPYLSSEEDRKKGKKFARYQLGDLLLHLEKKHGEDWGKVYDEAWERIDKKVEGLSKHIKLEEERRSEDAQSKAALTDWLRAKASFVIEGLKEADKDEFCRCELKLQKWYGDLRGKPFAIEAENSILDISGFSKQYNCAFIWQKDGVKKLNLYLIINYFKGGKLRFKKIKPEAFEANRFYTVINKKSGEIVPMEVNFNFDDPNLIILPLAFGKRQGREFIWNDLLSLETGSLKLANGRVIEKTLYNRRTRQDEPALFVALTFERREVLDSSNIKPMNLIGVDRGENIPAVIALTDPEGCPLSRFKDSLGNPTHILRIGESYKEKQRTIQAKKEVEQRRAGGYSRKYASKAKNLADDMVRNTARDLLYYAVTQDAMLIFENLSRGFGRQGKRTFMAERQYTRMEDWLTAKLAYEGLPSKTYLSKTLAQYTSKTCSNCGFTITSADYDRVLEKLKKTATGWMTTINGKELKVEGQITYYNRYKRQNVVKDLSVELDRLSEESVNNDISSWTKGRSGEALSLLKKRFSHRPVQEKFVCLNCGFETHADEQAALNIARSWLFLRSQEYKKYQTNKTTGNTDKRAFVETWQSFYRKKLKEVWKPAV

SEQ ID NO: 40041 - protein, 978 aa, Artificial Sequence
  CasX variant
QEIKRINKIRRRLVKDSNTKKAGKRGPMKTLLVRVMTPDLRERLENLRKKPENIPQPISNTSRANLNKLLTDYTEMKKAILHVYWEEFQKDPVGLMSRVAQPASKKIDQNKLKPEMDEKGNLTTAGFACSQCGQPLFVYKLEQVSEKGKAYTNYFGRCNVAEHEKLILLAQLKPEKDSDEAVTYSLGKFGQRALDFYSIHVTKESTHPVKPLAQIAGNRYASGPVGKALSDACMGTIASFLSKYQDIIIEHQKVVKGNQKRLESLRELAGKENLEYPSVTLPPQPHTKEGVDAYNEVIARVRMWVNLNLWQKLKLSRDDAKPLLRLKGFPSFPLVERQANEVDWWDMVCNVKKLINEKKEDGKVFWQNLAGYKRQEALRPYLSSEEDRKKGKKFARYQLGDLLLHLEKKHGEDWGKVYDEAWERIDKKVEGLSKHIKLEEERRSEDAQSKAALTDWLRAKASFVIEGLKEADKDEFCRCELKLQKWYGDLRGKPFAIEAENSILDISGFSKQYNCAFIWQKDGVKKLNLYLIINYFKGGKLRFKKIKPEAFEANRFYTVINKKSGEIVPMEVNFNFDDPNLIILPLAFGKRQGREFIWNDLLSLETGSLKLANGRVIEKTLYNRRTRQDEPALFVALTFERREVLDSSNIKPMNLIGVDRGENIPAVIALTDPEGCPLSRFKDSLGNPTHILRIGESYKEKQRTIQAKKEVEQRRAGGYSRKYASKAKNLADDMVRNTARDLLYYAVTQDAMLIFENLSRGFGRQGKRTFMAERQYTRMEDWLTAKLAYEGLPSKTYLSKTLAQYTSKTCSNCGFTITSADYDRVLEKLKKTATGWMTTINGKELKVEGQITYYNRYKRQNVVKDLSVELDRLSEESVNNDISSWTKGRSGEALSLLKKRFSHRPVQEKFVCLNCGFETHADEQAALNIARSWLFLRSQEYKKYQTNKTTGNTDKRAFVETWQSFYRKKLKEVWKPAV

SEQ ID NO: 40042 - protein, 978 aa, Artificial Sequence
  CasX variant
QEIKRINKIRRRLVKDSNTKKAGKTGPMKTLLVRVMTPDLRERLENLRKKPENIPQPISNTSRANLNKLLTDYTEMKKAILHVYWEEFQKDPVGLMSRVAQPASKKIDQNKLKPEMDEKGNLTTAGFACSQCGQPLFVYKLEQVSEKGKAYTNYFGRCNVAEHEKLILLAQLKPEKDSDEAVTYSLGKFGQRALDFYSIHVTKESTHPVKPLAQIAGNRYASGPVGKALSDACMGTIASFLSKYQDIIIEHQKVVKGNQKRLESLRELAGKENLEYPSVTLPPQPHTKEGVDAYNEVIARVRMWVNLNLWQKLKLSRDDAKPLLRLKGFPSFPLVERQANEVDWWDMVCNVKKLINEKKEDGKVFWQNLAGYKRQEALRPYLSSEEDRKKGKKFARYQLHDLLLHLEKKHGEDWGKVYDEAWERIDKKVEGLSKHIKLEEERRSEDAQSKAALTDWLRAKASFVIEGLKEADKDEFCRCELKLQKWYGDLRGKPFAIEAENSILDISGFSKQYNCAFIWQKDGVKKLNLYLIINYFKGGKLRFKKIKPEAFEANRFYTVINKKSGEIVPMEVNFNFDDPNLIILPLAFGKRQGREFIWNDLLSLETGSLKLANGRVIEKTLYNRRTRQDEPALFVALTFERREVLDSSNIKPMNLIGVDRGENIPAVIALTDPEGCPLSRFKDSLGNPTHILRIGESYKEKQRTIQAKKEVEQRRAGGYSRKYASKAKNLADDMVRNTARDLLYYAVTQDAMLIFENLSRGFGRQGKRTFMAERQYTRMEDWLTAKLAYEGLPSKTYLSKTLAQYTSKTCSNCGFTITSADYDRVLEKLKKTATGWMTTINGKELKVEGQITYYNRYKRQNVVKDLSVELDRLSEESVNNDISSWTKGRSGEALSLLKKRFSHRPVQEKFVCLNCGFETHADEQAALNIARSWLFLRSQEYKKYQTNKTTGNTDKRAFVETWQSFYRKKLKEVWKPAV

SEQ ID NO: 40043 - protein, 979 aa, Artificial Sequence
  CasX variant
QEIKRINKIRRRLVKDSNTKKAGKTGPMKTLLVRVMTPDLRERLENLRKKPENIPQPISNTSRANLNKLLTDYTEMKKAILHVYWEEFQKDPVGLMSRVAQPASKKIDQNKLKPEMDEKEGNLTTAGFACSQCGQPLFVYKLEQVSEKGKAYTNYFGRCNVAEHEKLILLAQLKPEKDSDEAVTYSLGKFGQRALDFYSIHVTKESTHPVKPLAQIAGNRYASGPVGKALSDACMGTIASFLSKYQDIIIEHQKVVKGNQKRLESLRELAGKENLEYPSVTLPPQPHTKEGVDAYNEVIARVRMWVNLNLWQKLKLSRDDAKPLLRLKGFPSFPLVERQANEVDWWDMVCNVKKLINEKKEDGKVFWQNLAGYKRQEALRPYLSSEEDRKKGKKFARYQLGDLLLHLEKKHGEDWGKVYDEAWERIDKKVEGLSKHIKLEEERRSEDAQSKAALTDWLRAKASFVIEGLKEADKDEFCRCELKLQKWYGDLRGKPFAIEAENSILDISGFSKQYNCAFIWQKDGVKKLNLYLIINYFKGGKLRFKKIKPEAFEANRFYTVINKKSGEIVPMEVNFNFDDPNLIILPLAFGKRQGREFIWNDLLSLETGSLKLANGRVIEKTLYNRRTRQDEPALFVALTFERREVLDSSNIKPMNLIGVDRGENIPAVIALTDPEGCPLSRFKDSLGNPTHILRIGESYKEKQRTIQAKKEVEQRRAGGYSRKYASKAKNLADDMVRNTARDLLYYAVTQDAMLIFENLSRGFGRQGKRTFMAERQYTRMEDWLTAKLAYEGLPSKTYLSKTLAQYTSKTCSNCGFTITSADYDRVLEKLKKTATGWMTTINGKELKVEGQITYYNRYKRQNVVKDLSVELDRLSEESVNNDISSWTKGRSGEALSLLKKRFSHRPVQEKFVCLNCGFETHADEQAALNIARSWLFLRSQEYKKYQTNKTTGNTDKRAFVETWQSFYRKKLKEVWKPAV

SEQ ID NO: 40044 - protein, 978 aa, Artificial Sequence
  CasX variant
QEIKRINKIRRRLVKDSNTKKAGKTGPMKTLLVRVMTPDLRERLENLRKKPENIPQPISNTSRANLNKLLTDYTEMKKAILHVYWEEFQKDPVGLMSRVAQPASKKIDQNKLKPEMDEKGNLTTAGFACSQCGQPLFVYKLEQVSEKGKAYTNYFGRCNVAEHEKLILLAQLKPEKDSDEAVTYSLGKFGQRALDFYSIHVTKESTHPVKPLAQIAGNRYASGPVGKALSDACMGTIASFLSKYQDIIIEHQKVVKGNQKRLESLRELAGKENLEYPSVTLPPQPHTKEGVDAYNEVIARVRMWVNINLWQKLKLSRDDAKPLLRLKGFPSFPLVERQANEVDWWDMVCNVKKLINEKKEDGKVFWQNLAGYKRQEALRPYLSSEEDRKKGKKFARYQLGDLLLHLEKKHGEDWGKVYDEAWERIDKKVEGLSKHIKLEEERRSEDAQSKAALTDWLRAKASFVIEGLKEADKDEFCRCELKLQKWYGDLRGKPFAIEAENSILDISGFSKQYNCAFIWQKDGVKKLNLYLIINYFKGGKLRFKKIKPEAFEANRFYTVINKKSGEIVPMEVNFNFDDPNLIILPLAFGKRQGREFIWNDLLSLETGSLKLANGRVIEKTLYNRRTRQDEPALFVALTFERREVLDSSNIKPMNLIGVDRGENIPAVIALTDPEGCPLSRFKDSLGNPTHILRIGESYKEKQRTIQAKKEVEQRRAGGYSRKYASKAKNLADDMVRNTARDLLYYAVTQDAMLIFENLSRGFGRQGKRTFMAERQYTRMEDWLTAKLAYEGLPSKTYLSKTLAQYTSKTCSNCGFTITSADYDRVLEKLKKTATGWMTTINGKELKVEGQITYYNRYKRQNVVKDLSVELDRLSEESVNNDISSWTKGRSGEALSLLKKRFSHRPVQEKFVCLNCGFETHADEQAALNIARSWLFLRSQEYKKYQTNKTTGNTDKRAFVETWQSFYRKKLKEVWKPAV

SEQ ID NO: 40045 - protein, 979 aa, Artificial Sequence
  CasX variant
QEIKRINKIRRRLVKDSNTKKAGKTGPMKTLLVRVMTPDLRERLENLRKKPENIPQPISNTSRANLNKLLTDYTEMKKAILHVYWEEFQKDPVGLMSRVAQPASKKIDQNKLKPEMDEKGNLTTAGFACSQCGQPLFVYKLEQVSEKGKAYTNYFGRCNVAEHEKLILLAQLKPEKDSDEAVTYSLGKFGQRALDFYSIHVTKESTHPVKPLAQIAGNRYASGPVGKALSDACMGTIASFLSKYQDIIIEHQKVVKGNQKRLESLRELAGKENLEYPSVTLPPQPHTKEGVDAYNEVIARVRMWVNLNLWQKLKLSRDDAKPLLRLKGFPSFPLVERQANEVDWWDMVCNVKKLINEKKEDGKVFWQNLAGYKRQEALRPYLFSSEEDRKKGKKFARYQLGDLLLHLEKKHGEDWGKVYDEAWERIDKKVEGLSKHIKLEEERRSEDAQSKAALTDWLRAKASFVIEGLKEADKDEFCRCELKLQKWYGDLRGKPFAIEAENSILDISGFSKQYNCAFIWQKDGVKKLNLYLIINYFKGGKLRFKKIKPEAFEANRFYTVINKKSGEIVPMEVNFNFDDPNLIILPLAFGKRQGREFIWNDLLSLETGSLKLANGRVIEKTLYNRRTRQDEPALFVALTFERREVLDSSNIKPMNLIGVDRGENIPAVIALTDPEGCPLSRFKDSLGNPTHILRIGESYKEKQRTIQAKKEVEQRRAGGYSRKYASKAKNLADDMVRNTARDLLYYAVTQDAMLIFENLSRGFGRQGKRTFMAERQYTRMEDWLTAKLAYEGLPSKTYLSKTLAQYTSKTCSNCGFTITSADYDRVLEKLKKTATGWMTTINGKELKVEGQITYYNRYKRQNVVKDLSVELDRLSEESVNNDISSWTKGRSGEALSLLKKRFSHRPVQEKFVCLNCGFETHADEQAALNIARSWLFLRSQEYKKYQTNKTTGNTDKRAFVETWQSFYRKKLKEVWKPAV

SEQ ID NO: 40046 - protein, 979 aa, Artificial Sequence
  CasX variant
QEIKRINKIRRRLVKDSNTKKAGKTGPMKTLLVRVMTPDLRERLENLRKKPENIPQPISNTSRANLNKLLTDYTEMKKAILHVYWEEFQKDPVGLMSRVAQPASKKIDQNKLKPEMDEKGNLTTAGFACSQCGQPLFVYKWLEQVSEKGKAYTNYFGRCNVAEHEKLILLAQLKPEKDSDEAVTYSLGKFGQRALDFYSIHVTKESTHPVKPLAQIAGNRYASGPVGKALSDACMGTIASFLSKYQDIIIEHQKVVKGNQKRLESLRELAGKENLEYPSVTLPPQPHTKEGVDAYNEVIARVRMWVNLNLWQKLKLSRDDAKPLLRLKGFPSFPLVERQANEVDWWDMVCNVKKLINEKKEDGKVFWQNLAGYKRQEALRPYLSSEEDRKKGKKFARYQLGDLLLHLEKKHGEDWGKVYDEAWERIDKKVEGLSKHIKLEEERRSEDAQSKAALTDWLRAKASFVIEGLKEADKDEFCRCELKLQKWYGDLRGKPFAIEAENSILDISGFSKQYNCAFIWQKDGVKKLNLYLIINYFKGGKLRFKKIKPEAFEANRFYTVINKKSGEIVPMEVNFNFDDPNLIILPLAFGKRQGREFIWNDLLSLETGSLKLANGRVIEKTLYNRRTRQDEPALFVALTFERREVLDSSNIKPMNLIGVDRGENIPAVIALTDPEGCPLSRFKDSLGNPTHILRIGESYKEKQRTIQAKKEVEQRRAGGYSRKYASKAKNLADDMVRNTARDLLYYAVTQDAMLIFENLSRGFGRQGKRTFMAERQYTRMEDWLTAKLAYEGLPSKTYLSKTLAQYTSKTCSNCGFTITSADYDRVLEKLKKTATGWMTTINGKELKVEGQITYYNRYKRQNVVKDLSVELDRLSEESVNNDISSWTKGRSGEALSLLKKRFSHRPVQEKFVCLNCGFETHADEQAALNIARSWLFLRSQEYKKYQTNKTTGNTDKRAFVETWQSFYRKKLKEVWKPAV

SEQ ID NO: 40047 - protein, 978 aa, Artificial Sequence
  CasX variant
QEIKRINKIRRRLVKDSNTKKAGKTGPMKTLLVRVMTPDLRERLENLRKKPENIPQPISNTSRANLNKLLTDYTEMKKAILHVYWEEFQKDPVGLMSRVAQPASKKIDQNKLKPEMDEKGNLTTAGFACSQCGQPLFVYKLEQVSEKGKAYTNYFGRCNVAEHEKLILLAQLKPEKDSDEAVTYSLGKFGQRALDFYSIHVTKESTHPVKPLAQIAGNRYASGPVGKALSDACMGTIASFLSKYQDIIIEHQKVVKGNQKRLESLRELAGKENLEYPSVTLPPQPHTKEGVDAYNEVIARVRMWVNDNLWQKLKLSRDDAKPLLRLKGFPSFPLVERQANEVDWWDMVCNVKKLINEKKEDGKVFWQNLAGYKRQEALRPYLSSEEDRKKGKKFARYQLGDLLLHLEKKHGEDWGKVYDEAWERIDKKVEGLSKHIKLEEERRSEDAQSKAALTDWLRAKASFVIEGLKEADKDEFCRCELKLQKWYGDLRGKPFAIEAENSILDISGFSKQYNCAFIWQKDGVKKLNLYLIINYFKGGKLRFKKIKPEAFEANRFYTVINKKSGEIVPMEVNFNFDDPNLIILPLAFGKRQGREFIWNDLLSLETGSLKLANGRVIEKTLYNRRTRQDEPALFVALTFERREVLDSSNIKPMNLIGVDRGENIPAVIALTDPEGCPLSRFKDSLGNPTHILRIGESYKEKQRTIQAKKEVEQRRAGGYSRKYASKAKNLADDMVRNTARDLLYYAVTQDAMLIFENLSRGFGRQGKRTFMAERQYTRMEDWLTAKLAYEGLPSKTYLSKTLAQYTSKTCSNCGFTITSADYDRVLEKLKKTATGWMTTINGKELKVEGQITYYNRYKRQNVVKDLSVELDRLSEESVNNDISSWTKGRSGEALSLLKKRFSHRPVQEKFVCLNCGFETHADEQAALNIARSWLFLRSQEYKKYQTNKTTGNTDKRAFVETWQSFYRKKLKEVWKPAV

SEQ ID NO: 40048 - protein, 978 aa, Artificial Sequence
  CasX variant
QEIKRINKIRRRLVKDSNTKKAGKTGPMKTLLVRVMTPDLRERLENLRKKPENIPQPISNTSRANLNKLLTDYTEMKKAILHVYWEEFQKDPVGLMSRVAQPASKKIDQNKLKPEMDEKGNLTTAGFACSQCGQPLFVYKLEQVSEKGKAYTNYFGRCNVAEHEKLILLAQLKPEKDSDEAVTYSLGKFGQRALDFYSIHVTKESTHPVKPLAQIAGNRYASGPVGKALSDACMGTIASFLSKYQDIIIEHQKVVKGNQKRLESLRELAGKENLEYPSVTLPPQPHTKEGVDAYNEVIARVRMWVNLNLWQKLKLSRDDAKPLLRLKGFPSFPLVERQANEVDWWDMVCNVKKLINEKKEDGKVFWQNLAGYKRQEALRPYLSSEEDRKKGKKFARYQLGDLLLHLEKKHGEDWGKVYDEAWERIDKKVEGLSKHIKLEEERRSEDAQSKAALTDWLRAKASFVIEGLKEADKDEFCRCELKLQKWYGDLRGKPFAIEAENSILDISGFSTQYNCAFIWQKDGVKKLNLYLIINYFKGGKLRFKKIKPEAFEANRFYTVINKKSGEIVPMEVNFNFDDPNLIILPLAFGKRQGREFIWNDLLSLETGSLKLANGRVIEKTLYNRRTRQDEPALFVALTFERREVLDSSNIKPMNLIGVDRGENIPAVIALTDPEGCPLSRFKDSLGNPTHILRIGESYKEKQRTIQAKKEVEQRRAGGYSRKYASKAKNLADDMVRNTARDLLYYAVTQDAMLIFENLSRGFGRQGKRTFMAERQYTRMEDWLTAKLAYEGLPSKTYLSKTLAQYTSKTCSNCGFTITSADYDRVLEKLKKTATGWMTTINGKELKVEGQITYYNRYKRQNVVKDLSVELDRLSEESVNNDISSWTKGRSGEALSLLKKRFSHRPVQEKFVCLNCGFETHADEQAALNIARSWLFLRSQEYKKYQTNKTTGNTDKRAFVETWQSFYRKKLKEVWKPAV

SEQ ID NO: 40049 - protein, 978 aa, Artificial Sequence
  CasX variant
QEIKRINKIRRRLVKDSNTKKAGKTGPMKTLLVRVMTPDLRERLENLRKKPENIPQPISNTSRANLNKLLTDYTEMKKAILHVYWEEFQKDPVGLMSRVAQPASKKIDQNKLKPEMDEKGNLTTAGFACSQCGQPLFVYKLEQVSEKGKAYTNYFGRCNVAEHEKLILLDQLKPEKDSDEAVTYSLGKFGQRALDFYSIHVTKESTHPVKPLAQIAGNRYASGPVGKALSDACMGTIASFLSKYQDIIIEHQKVVKGNQKRLESLRELAGKENLEYPSVTLPPQPHTKEGVDAYNEVIARVRMWVNLNLWQKLKLSRDDAKPLLRLKGFPSFPLVERQANEVDWWDMVCNVKKLINEKKEDGKVFWQNLAGYKRQEALRPYLSSEEDRKKGKKFARYQLGDLLLHLEKKHGEDWGKVYDEAWERIDKKVEGLSKHIKLEEERRSEDAQSKAALTDWLRAKASFVIEGLKEADKDEFCRCELKLQKWYGDLRGKPFAIEAENSILDISGFSKQYNCAFIWQKDGVKKLNLYLIINYFKGGKLRFKKIKPEAFEANRFYTVINKKSGEIVPMEVNFNFDDPNLIILPLAFGKRQGREFIWNDLLSLETGSLKLANGRVIEKTLYNRRTRQDEPALFVALTFERREVLDSSNIKPMNLIGVDRGENIPAVIALTDPEGCPLSRFKDSLGNPTHILRIGESYKEKQRTIQAKKEVEQRRAGGYSRKYASKAKNLADDMVRNTARDLLYYAVTQDAMLIFENLSRGFGRQGKRTFMAERQYTRMEDWLTAKLAYEGLPSKTYLSKTLAQYTSKTCSNCGFTITSADYDRVLEKLKKTATGWMTTINGKELKVEGQITYYNRYKRQNVVKDLSVELDRLSEESVNNDISSWTKGRSGEALSLLKKRFSHRPVQEKFVCLNCGFETHADEQAALNIARSWLFLRSQEYKKYQTNKTTGNTDKRAFVETWQSFYRKKLKEVWKPAV

SEQ ID NO: 40050 - protein, 978 aa, Artificial Sequence
  CasX variant
QEIKRINKIRRRLVKDSNTKKAGKTGPMKTLLVRVMTPDLRERLENLRKKPENIPQPISNTSRANLNKLLTDYTEMKKAILHVYWEEFQKDPVGLMSRVAQPASKKIDQNKLKPEMDEKGNLTTAGFACSQCGQPLFVYKLEQVSEKGKAYTNYFGRCNVAEHEKLIPLAQLKPEKDSDEAVTYSLGKFGQRALDFYSIHVTKESTHPVKPLAQIAGNRYASGPVGKALSDACMGTIASFLSKYQDIIIEHQKVVKGNQKRLESLRELAGKENLEYPSVTLPPQPHTKEGVDAYNEVIARVRMWVNLNLWQKLKLSRDDAKPLLRLKGFPSFPLVERQANEVDWWDMVCNVKKLINEKKEDGKVFWQNLAGYKRQEALRPYLSSEEDRKKGKKFARYQLGDLLLHLEKKHGEDWGKVYDEAWERIDKKVEGLSKHIKLEEERRSEDAQSKAALTDWLRAKASFVIEGLKEADKDEFCRCELKLQKWYGDLRGKPFAIEAENSILDISGFSKQYNCAFIWQKDGVKKLNLYLIINYFKGGKLRFKKIKPEAFEANRFYTVINKKSGEIVPMEVNFNFDDPNLIILPLAFGKRQGREFIWNDLLSLETGSLKLANGRVIEKTLYNRRTRQDEPALFVALTFERREVLDSSNIKPMNLIGVDRGENIPAVIALTDPEGCPLSRFKDSLGNPTHILRIGESYKEKQRTIQAKKEVEQRRAGGYSRKYASKAKNLADDMVRNTARDLLYYAVTQDAMLIFENLSRGFGRQGKRTFMAERQYTRMEDWLTAKLAYEGLPSKTYLSKTLAQYTSKTCSNCGFTITSADYDRVLEKLKKTATGWMTTINGKELKVEGQITYYNRYKRQNVVKDLSVELDRLSEESVNNDISSWTKGRSGEALSLLKKRFSHRPVQEKFVCLNCGFETHADEQAALNIARSWLFLRSQEYKKYQTNKTTGNTDKRAFVETWQSFYRKKLKEVWKPAV

SEQ ID NO: 40051 - protein, 978 aa, Artificial Sequence
  CasX variant
QEIKRINKIRRRLVKDSNTKKAGKTGPMKTLLVRVMTPDLRERLENLRKKPENIPQPISNTSRANLNKLLTDYTEMKKAILHVYWEEFQKDPVGLMSRVAQPASKKIDQNKLKPEMDEKGNLTTAGFACSQCGQPLFVYKLEQVSEKGKAYTNYFGRCNVAEHEKLILLAQLKPEKDSDEAVTYSLGKFGQRALDFYSIHVTKESTHPVKPLAQIAGNRYASGPVGKALSDACMGTIASFLSKYQDIIIEHQKVVKGNQKRLESLRELAGKENLEYPSVTLPPQPHTKEGVDAYNEVIARVRMWVNLNLWQKLKLSRDDAKPLLRLKGFPSFPLVERQANEVDWWDMVCNVKKLINEKKEDGKVFWQNLAGYKRQEALRPYLSSEEDRKKGKKFARYQLGDLLLHLEKKHGEDWGKVYDEAWERIDKKVEGLSKHIKLEEERRSEDAQSKAALTDWLRAKASFVIEGLKEADKDEFCRCELKLQKWYGDLRGKPFAIEAENSILDISGFSKQYNCAFIWQKDGVKKLNLYLIINYFKGGKLRFKKIKPEAFEANRFYTVINKKSGEIVPMEVNFNFDDPNLIILPLAFGKRQGREFIWNDLLSLETGSLKLANGRVIEKTLYNRRTRQDEPALFVALTFERREVLDSSNIKPMNLIGVDRGENIPAVIALTDPEGCPLSRFKDSLGNPTHILRIGESYKEKQRTIQAKKEVEQRRAGGYSRKYASKAKNLADDMVRNTARDLLYYAVTQDAMLIFENLSRGFGRQGKRTFMAERQYTRMEDWLTAKKAYEGLPSKTYLSKTLAQYTSKTCSNCGFTITSADYDRVLEKLKKTATGWMTTINGKELKVEGQITYYNRYKRQNVVKDLSVELDRLSEESVNNDISSWTKGRSGEALSLLKKRFSHRPVQEKFVCLNCGFETHADEQAALNIARSWLFLRSQEYKKYQTNKTTGNTDKRAFVETWQSFYRKKLKEVWKPAV

SEQ ID NO: 40052 - protein, 978 aa, Artificial Sequence
  CasX variant
QEIKRINKIRRRLVKDSNTKKAGKTGPMKTLLVRVMTPDLRERLENLRKKPENIPQPISNTSRANLNKLLTDYTEMKKAILHVYWEEFQKDPVGLMSRVAQPASKKIDQNKLKPEMDEKGNLTTAGFACSQCGQPLFVYKLEQVSEKGKAYTNYFGRCNVAEHEKLILLAQLKPEKDSDEAVTYSLGKFGQRALDFYSIHVTKESTHPVKPLAQIAGNRYASGPVGKALSDACMGTIASFLSKYQDIIIEHQKVVKGNQKRLESLRELAGKENLEYPSVTLPPQPHTKEGVDAYNEVIARVRMWVNLNLWQKLKLSRDDAKPLLRLKGFPSFPLVERQANEVDWWDMVCNVKKLINEKKEDGKVFWQNLAGYKRQEALRPYLSSEEDRKKGKKFARYQLGDLLLHLEKKHGEDWGKVYDEAWERIDKKVEGLSKHIKLEEERRSEDAQSKAALTDWLRAKASFVIEGLKEADKDEFCRCELKLQKWYGDLRGKPFAIEAENSILDISGFSKQYNCAFIWQKDGVKKLNLYLIINYFKGGKLRFKKIKPEAFEANRFYTVINKKSGEIVPMEVNFNFDDPNLIILPLAFGKRQGREFIWNDLLSLETGSLKLANGRVIEKTLYNRRTRQDEPALFVALTFERREVLDSSNIKPMNLIGVDRGENIPAVIALTDPEGCPLSRFKDSLGNPTHILRIGESYKEKQRTIQAKKEVEQRRAGGYSRKYASKAKNLADDMVRNTARDLLYYAVTQDAMLIFENLSRGFGRQGKRTFMAERQYTRMEDWLTAKLKYEGLPSKTYLSKTLAQYTSKTCSNCGFTITSADYDRVLEKLKKTATGWMTTINGKELKVEGQITYYNRYKRQNVVKDLSVELDRLSEESVNNDISSWTKGRSGEALSLLKKRFSHRPVQEKFVCLNCGFETHADEQAALNIARSWLFLRSQEYKKYQTNKTTGNTDKRAFVETWQSFYRKKLKEVWKPAV

SEQ ID NO: 40053 - protein, 978 aa, Artificial Sequence
  CasX variant
QEGKRINKIRRRLVKDSNTKKAGKTGPMKTLLVRVMTPDLRERLENLRKKPENIPQPISNTSRANLNKLLTDYTEMKKAILHVYWEEFQKDPVGLMSRVAQPASKKIDQNKLKPEMDEKGNLTTAGFACSQCGQPLFVYKLEQVSEKGKAYTNYFGRCNVAEHEKLILLAQLKPEKDSDEAVTYSLGKFGQRALDFYSIHVTKESTHPVKPLAQIAGNRYASGPVGKALSDACMGTIASFLSKYQDIIIEHQKVVKGNQKRLESLRELAGKENLEYPSVTLPPQPHTKEGVDAYNEVIARVRMWVNLNLWQKLKLSRDDAKPLLRLKGFPSFPLVERQANEVDWWDMVCNVKKLINEKKEDGKVFWQNLAGYKRQEALRPYLSSEEDRKKGKKFARYQLGDLLLHLEKKHGEDWGKVYDEAWERIDKKVEGLSKHIKLEEERRSEDAQSKAALTDWLRAKASFVIEGLKEADKDEFCRCELKLQKWYGDLRGKPFAIEAENSILDISGFSKQYNCAFIWQKDGVKKLNLYLIINYFKGGKLRFKKIKPEAFEANRFYTVINKKSGEIVPMEVNFNFDDPNLIILPLAFGKRQGREFIWNDLLSLETGSLKLANGRVIEKTLYNRRTRQDEPALFVALTFERREVLDSSNIKPMNLIGVDRGENIPAVIALTDPEGCPLSRFKDSLGNPTHILRIGESYKEKQRTIQAKKEVEQRRAGGYSRKYASKAKNLADDMVRNTARDLLYYAVTQDAMLIFENLSRGFGRQGKRTFMAERQYTRMEDWLTAKLAYEGLPSKTYLSKTLAQYTSKTCSNCGFTITSADYDRVLEKLKKTATGWMTTINGKELKVEGQITYYNRYKRQNVVKDLSVELDRLSEESVNNDISSWTKGRSGEALSLLKKRFSHRPVQEKFVCLNCGFETHADEQAALNIARSWLFLRSQEYKKYQTNKTTGNTDKRAFVETWQSFYRKKLKEVWKPAV

SEQ ID NO: 40054 - protein, 978 aa, Artificial Sequence
  CasX variant
QEEKRINKIRRRLVKDSNTKKAGKTGPMKTLLVRVMTPDLRERLENLRKKPENIPQPISNTSRANLNKLLTDYTEMKKAILHVYWEEFQKDPVGLMSRVAQPASKKIDQNKLKPEMDEKGNLTTAGFACSQCGQPLFVYKLEQVSEKGKAYTNYFGRCNVAEHEKLILLAQLKPEKDSDEAVTYSLGKFGQRALDFYSIHVTKESTHPVKPLAQIAGNRYASGPVGKALSDACMGTIASFLSKYQDIIIEHQKVVKGNQKRLESLRELAGKENLEYPSVTLPPQPHTKEGVDAYNEVIARVRMWVNLNLWQKLKLSRDDAKPLLRLKGFPSFPLVERQANEVDWWDMVCNVKKLINEKKEDGKVFWQNLAGYKRQEALRPYLSSEEDRKKGKKFARYQLGDLLLHLEKKHGEDWGKVYDEAWERIDKKVEGLSKHIKLEEERRSEDAQSKAALTDWLRAKASFVIEGLKEADKDEFCRCELKLQKWYGDLRGKPFAIEAENSILDISGFSKQYNCAFIWQKDGVKKLNLYLIINYFKGGKLRFKKIKPEAFEANRFYTVINKKSGEIVPMEVNFNFDDPNLIILPLAFGKRQGREFIWNDLLSLETGSLKLANGRVIEKTLYNRRTRQDEPALFVALTFERREVLDSSNIKPMNLIGVDRGENIPAVIALTDPEGCPLSRFKDSLGNPTHILRIGESYKEKQRTIQAKKEVEQRRAGGYSRKYASKAKNLADDMVRNTARDLLYYAVTQDAMLIFENLSRGFGRQGKRTFMAERQYTRMEDWLTAKLAYEGLPSKTYLSKTLAQYTSKTCSNCGFTITSADYDRVLEKLKKTATGWMTTINGKELKVEGQITYYNRYKRQNVVKDLSVELDRLSEESVNNDISSWTKGRSGEALSLLKKRFSHRPVQEKFVCLNCGFETHADEQAALNIARSWLFLRSQEYKKYQTNKTTGNTDKRAFVETWQSFYRKKLKEVWKPAV

SEQ ID NO: 40055 - protein, 979 aa, Artificial Sequence
  CasX variant
QEIGKRINKIRRRLVKDSNTKKAGKTGPMKTLLVRVMTPDLRERLENLRKKPENIPQPISNTSRANLNKLLTDYTEMKKAILHVYWEEFQKDPVGLMSRVAQPASKKIDQNKLKPEMDEKGNLTTAGFACSQCGQPLFVYKLEQVSEKGKAYTNYFGRCNVAEHEKLILLAQLKPEKDSDEAVTYSLGKFGQRALDFYSIHVTKESTHPVKPLAQIAGNRYASGPVGKALSDACMGTIASFLSKYQDIIIEHQKVVKGNQKRLESLRELAGKENLEYPSVTLPPQPHTKEGVDAYNEVIARVRMWVNLNLWQKLKLSRDDAKPLLRLKGFPSFPLVERQANEVDWWDMVCNVKKLINEKKEDGKVFWQNLAGYKRQEALRPYLSSEEDRKKGKKFARYQLGDLLLHLEKKHGEDWGKVYDEAWERIDKKVEGLSKHIKLEEERRSEDAQSKAALTDWLRAKASFVIEGLKEADKDEFCRCELKLQKWYGDLRGKPFAIEAENSILDISGFSKQYNCAFIWQKDGVKKLNLYLIINYFKGGKLRFKKIKPEAFEANRFYTVINKKSGEIVPMEVNFNFDDPNLIILPLAFGKRQGREFIWNDLLSLETGSLKLANGRVIEKTLYNRRTRQDEPALFVALTFERREVLDSSNIKPMNLIGVDRGENIPAVIALTDPEGCPLSRFKDSLGNPTHILRIGESYKEKQRTIQAKKEVEQRRAGGYSRKYASKAKNLADDMVRNTARDLLYYAVTQDAMLIFENLSRGFGRQGKRTFMAERQYTRMEDWLTAKLAYEGLPSKTYLSKTLAQYTSKTCSNCGFTITSADYDRVLEKLKKTATGWMTTINGKELKVEGQITYYNRYKRQNVVKDLSVELDRLSEESVNNDISSWTKGRSGEALSLLKKRFSHRPVQEKFVCLNCGFETHADEQAALNIARSWLFLRSQEYKKYQTNKTTGNTDKRAFVETWQSFYRKKLKEVWKPAV

SEQ ID NO: 40056 - protein, 978 aa, Artificial Sequence
  CasX variant
QEIGRINKIRRRLVKDSNTKKAGKTGPMKTLLVRVMTPDLRERLENLRKKPENIPQPISNTSRANLNKLLTDYTEMKKAILHVYWEEFQKDPVGLMSRVAQPASKKIDQNKLKPEMDEKGNLTTAGFACSQCGQPLFVYKLEQVSEKGKAYTNYFGRCNVAEHEKLILLAQLKPEKDSDEAVTYSLGKFGQRALDFYSIHVTKESTHPVKPLAQIAGNRYASGPVGKALSDACMGTIASFLSKYQDIIIEHQKVVKGNQKRLESLRELAGKENLEYPSVTLPPQPHTKEGVDAYNEVIARVRMWVNLNLWQKLKLSRDDAKPLLRLKGFPSFPLVERQANEVDWWDMVCNVKKLINEKKEDGKVFWQNLAGYKRQEALRPYLSSEEDRKKGKKFARYQLGDLLLHLEKKHGEDWGKVYDEAWERIDKKVEGLSKHIKLEEERRSEDAQSKAALTDWLRAKASFVIEGLKEADKDEFCRCELKLQKWYGDLRGKPFAIEAENSILDISGFSKQYNCAFIWQKDGVKKLNLYLIINYFKGGKLRFKKIKPEAFEANRFYTVINKKSGEIVPMEVNFNFDDPNLIILPLAFGKRQGREFIWNDLLSLETGSLKLANGRVIEKTLYNRRTRQDEPALFVALTFERREVLDSSNIKPMNLIGVDRGENIPAVIALTDPEGCPLSRFKDSLGNPTHILRIGESYKEKQRTIQAKKEVEQRRAGGYSRKYASKAKNLADDMVRNTARDLLYYAVTQDAMLIFENLSRGFGRQGKRTFMAERQYTRMEDWLTAKLAYEGLPSKTYLSKTLAQYTSKTCSNCGFTITSADYDRVLEKLKKTATGWMTTINGKELKVEGQITYYNRYKRQNVVKDLSVELDRLSEESVNNDISSWTKGRSGEALSLLKKRFSHRPVQEKFVCLNCGFETHADEQAALNIARSWLFLRSQEYKKYQTNKTTGNTDKRAFVETWQSFYRKKLKEVWKPAV

SEQ ID NO: 40057 - protein, 978 aa, Artificial Sequence
  CasX variant
QEISRINKIRRRLVKDSNTKKAGKTGPMKTLLVRVMTPDLRERLENLRKKPENIPQPISNTSRANLNKLLTDYTEMKKAILHVYWEEFQKDPVGLMSRVAQPASKKIDQNKLKPEMDEKGNLTTAGFACSQCGQPLFVYKLEQVSEKGKAYTNYFGRCNVAEHEKLILLAQLKPEKDSDEAVTYSLGKFGQRALDFYSIHVTKESTHPVKPLAQIAGNRYASGPVGKALSDACMGTIASFLSKYQDIIIEHQKVVKGNQKRLESLRELAGKENLEYPSVTLPPQPHTKEGVDAYNEVIARVRMWVNLNLWQKLKLSRDDAKPLLRLKGFPSFPLVERQANEVDWWDMVCNVKKLINEKKEDGKVFWQNLAGYKRQEALRPYLSSEEDRKKGKKFARYQLGDLLLHLEKKHGEDWGKVYDEAWERIDKKVEGLSKHIKLEEERRSEDAQSKAALTDWLRAKASFVIEGLKEADKDEFCRCELKLQKWYGDLRGKPFAIEAENSILDISGFSKQYNCAFIWQKDGVKKLNLYLIINYFKGGKLRFKKIKPEAFEANRFYTVINKKSGEIVPMEVNFNFDDPNLIILPLAFGKRQGREFIWNDLLSLETGSLKLANGRVIEKTLYNRRTRQDEPALFVALTFERREVLDSSNIKPMNLIGVDRGENIPAVIALTDPEGCPLSRFKDSLGNPTHILRIGESYKEKQRTIQAKKEVEQRRAGGYSRKYASKAKNLADDMVRNTARDLLYYAVTQDAMLIFENLSRGFGRQGKRTFMAERQYTRMEDWLTAKLAYEGLPSKTYLSKTLAQYTSKTCSNCGFTITSADYDRVLEKLKKTATGWMTTINGKELKVEGQITYYNRYKRQNVVKDLSVELDRLSEESVNNDISSWTKGRSGEALSLLKKRFSHRPVQEKFVCLNCGFETHADEQAALNIARSWLFLRSQEYKKYQTNKTTGNTDKRAFVETWQSFYRKKLKEVWKPAV

SEQ ID NO: 40058 - protein, 979 aa, Artificial Sequence
  CasX variant
QEIKGRINKIRRRLVKDSNTKKAGKTGPMKTLLVRVMTPDLRERLENLRKKPENIPQPISNTSRANLNKLLTDYTEMKKAILHVYWEEFQKDPVGLMSRVAQPASKKIDQNKLKPEMDEKGNLTTAGFACSQCGQPLFVYKLEQVSEKGKAYTNYFGRCNVAEHEKLILLAQLKPEKDSDEAVTYSLGKFGQRALDFYSIHVTKESTHPVKPLAQIAGNRYASGPVGKALSDACMGTIASFLSKYQDIIIEHQKVVKGNQKRLESLRELAGKENLEYPSVTLPPQPHTKEGVDAYNEVIARVRMWVNLNLWQKLKLSRDDAKPLLRLKGFPSFPLVERQANEVDWWDMVCNVKKLINEKKEDGKVFWQNLAGYKRQEALRPYLSSEEDRKKGKKFARYQLGDLLLHLEKKHGEDWGKVYDEAWERIDKKVEGLSKHIKLEEERRSEDAQSKAALTDWLRAKASFVIEGLKEADKDEFCRCELKLQKWYGDLRGKPFAIEAENSILDISGFSKQYNCAFIWQKDGVKKLNLYLIINYFKGGKLRFKKIKPEAFEANRFYTVINKKSGEIVPMEVNFNFDDPNLIILPLAFGKRQGREFIWNDLLSLETGSLKLANGRVIEKTLYNRRTRQDEPALFVALTFERREVLDSSNIKPMNLIGVDRGENIPAVIALTDPEGCPLSRFKDSLGNPTHILRIGESYKEKQRTIQAKKEVEQRRAGGYSRKYASKAKNLADDMVRNTARDLLYYAVTQDAMLIFENLSRGFGRQGKRTFMAERQYTRMEDWLTAKLAYEGLPSKTYLSKTLAQYTSKTCSNCGFTITSADYDRVLEKLKKTATGWMTTINGKELKVEGQITYYNRYKRQNVVKDLSVELDRLSEESVNNDISSWTKGRSGEALSLLKKRFSHRPVQEKFVCLNCGFETHADEQAALNIARSWLFLRSQEYKKYQTNKTTGNTDKRAFVETWQSFYRKKLKEVWKPAV

SEQ ID NO: 40059 - protein, 978 aa, Artificial Sequence
  CasX variant
QEIKSINKIRRRLVKDSNTKKAGKTGPMKTLLVRVMTPDLRERLENLRKKPENIPQPISNTSRANLNKLLTDYTEMKKAILHVYWEEFQKDPVGLMSRVAQPASKKIDQNKLKPEMDEKGNLTTAGFACSQCGQPLFVYKLEQVSEKGKAYTNYFGRCNVAEHEKLILLAQLKPEKDSDEAVTYSLGKFGQRALDFYSIHVTKESTHPVKPLAQIAGNRYASGPVGKALSDACMGTIASFLSKYQDIIIEHQKVVKGNQKRLESLRELAGKENLEYPSVTLPPQPHTKEGVDAYNEVIARVRMWVNLNLWQKLKLSRDDAKPLLRLKGFPSFPLVERQANEVDWWDMVCNVKKLINEKKEDGKVFWQNLAGYKRQEALRPYLSSEEDRKKGKKFARYQLGDLLLHLEKKHGEDWGKVYDEAWERIDKKVEGLSKHIKLEEERRSEDAQSKAALTDWLRAKASFVIEGLKEADKDEFCRCELKLQKWYGDLRGKPFAIEAENSILDISGFSKQYNCAFIWQKDGVKKLNLYLIINYFKGGKLRFKKIKPEAFEANRFYTVINKKSGEIVPMEVNFNFDDPNLIILPLAFGKRQGREFIWNDLLSLETGSLKLANGRVIEKTLYNRRTRQDEPALFVALTFERREVLDSSNIKPMNLIGVDRGENIPAVIALTDPEGCPLSRFKDSLGNPTHILRIGESYKEKQRTIQAKKEVEQRRAGGYSRKYASKAKNLADDMVRNTARDLLYYAVTQDAMLIFENLSRGFGRQGKRTFMAERQYTRMEDWLTAKLAYEGLPSKTYLSKTLAQYTSKTCSNCGFTITSADYDRVLEKLKKTATGWMTTINGKELKVEGQITYYNRYKRQNVVKDLSVELDRLSEESVNNDISSWTKGRSGEALSLLKKRFSHRPVQEKFVCLNCGFETHADEQAALNIARSWLFLRSQEYKKYQTNKTTGNTDKRAFVETWQSFYRKKLKEVWKPAV

SEQ ID NO: 40060 - protein, 978 aa, Artificial Sequence
  CasX variant
QEIKRANKIRRRLVKDSNTKKAGKTGPMKTLLVRVMTPDLRERLENLRKKPENIPQPISNTSRANLNKLLTDYTEMKKAILHVYWEEFQKDPVGLMSRVAQPASKKIDQNKLKPEMDEKGNLTTAGFACSQCGQPLFVYKLEQVSEKGKAYTNYFGRCNVAEHEKLILLAQLKPEKDSDEAVTYSLGKFGQRALDFYSIHVTKESTHPVKPLAQIAGNRYASGPVGKALSDACMGTIASFLSKYQDIIIEHQKVVKGNQKRLESLRELAGKENLEYPSVTLPPQPHTKEGVDAYNEVIARVRMWVNLNLWQKLKLSRDDAKPLLRLKGFPSFPLVERQANEVDWWDMVCNVKKLINEKKEDGKVFWQNLAGYKRQEALRPYLSSEEDRKKGKKFARYQLGDLLLHLEKKHGEDWGKVYDEAWERIDKKVEGLSKHIKLEEERRSEDAQSKAALTDWLRAKASFVIEGLKEADKDEFCRCELKLQKWYGDLRGKPFAIEAENSILDISGFSKQYNCAFIWQKDGVKKLNLYLIINYFKGGKLRFKKIKPEAFEANRFYTVINKKSGEIVPMEVNFNFDDPNLIILPLAFGKRQGREFIWNDLLSLETGSLKLANGRVIEKTLYNRRTRQDEPALFVALTFERREVLDSSNIKPMNLIGVDRGENIPAVIALTDPEGCPLSRFKDSLGNPTHILRIGESYKEKQRTIQAKKEVEQRRAGGYSRKYASKAKNLADDMVRNTARDLLYYAVTQDAMLIFENLSRGFGRQGKRTFMAERQYTRMEDWLTAKLAYEGLPSKTYLSKTLAQYTSKTCSNCGFTITSADYDRVLEKLKKTATGWMTTINGKELKVEGQITYYNRYKRQNVVKDLSVELDRLSEESVNNDISSWTKGRSGEALSLLKKRFSHRPVQEKFVCLNCGFETHADEQAALNIARSWLFLRSQEYKKYQTNKTTGNTDKRAFVETWQSFYRKKLKEVWKPAV

SEQ ID NO: 40061 - protein, 979 aa, Artificial Sequence
  CasX variant
QEIKRGINKIRRRLVKDSNTKKAGKTGPMKTLLVRVMTPDLRERLENLRKKPENIPQPISNTSRANLNKLLTDYTEMKKAILHVYWEEFQKDPVGLMSRVAQPASKKIDQNKLKPEMDEKGNLTTAGFACSQCGQPLFVYKLEQVSEKGKAYTNYFGRCNVAEHEKLILLAQLKPEKDSDEAVTYSLGKFGQRALDFYSIHVTKESTHPVKPLAQIAGNRYASGPVGKALSDACMGTIASFLSKYQDIIIEHQKVVKGNQKRLESLRELAGKENLEYPSVTLPPQPHTKEGVDAYNEVIARVRMWVNLNLWQKLKLSRDDAKPLLRLKGFPSFPLVERQANEVDWWDMVCNVKKLINEKKEDGKVFWQNLAGYKRQEALRPYLSSEEDRKKGKKFARYQLGDLLLHLEKKHGEDWGKVYDEAWERIDKKVEGLSKHIKLEEERRSEDAQSKAALTDWLRAKASFVIEGLKEADKDEFCRCELKLQKWYGDLRGKPFAIEAENSILDISGFSKQYNCAFIWQKDGVKKLNLYLIINYFKGGKLRFKKIKPEAFEANRFYTVINKKSGEIVPMEVNFNFDDPNLIILPLAFGKRQGREFIWNDLLSLETGSLKLANGRVIEKTLYNRRTRQDEPALFVALTFERREVLDSSNIKPMNLIGVDRGENIPAVIALTDPEGCPLSRFKDSLGNPTHILRIGESYKEKQRTIQAKKEVEQRRAGGYSRKYASKAKNLADDMVRNTARDLLYYAVTQDAMLIFENLSRGFGRQGKRTFMAERQYTRMEDWLTAKLAYEGLPSKTYLSKTLAQYTSKTCSNCGFTITSADYDRVLEKLKKTATGWMTTINGKELKVEGQITYYNRYKRQNVVKDLSVELDRLSEESVNNDISSWTKGRSGEALSLLKKRFSHRPVQEKFVCLNCGFETHADEQAALNIARSWLFLRSQEYKKYQTNKTTGNTDKRAFVETWQSFYRKKLKEVWKPAV

SEQ ID NO: 40062 - protein, 978 aa, Artificial Sequence
  CasX variant
QEIKRISKIRRRLVKDSNTKKAGKTGPMKTLLVRVMTPDLRERLENLRKKPENIPQPISNTSRANLNKLLTDYTEMKKAILHVYWEEFQKDPVGLMSRVAQPASKKIDQNKLKPEMDEKGNLTTAGFACSQCGQPLFVYKLEQVSEKGKAYTNYFGRCNVAEHEKLILLAQLKPEKDSDEAVTYSLGKFGQRALDFYSIHVTKESTHPVKPLAQIAGNRYASGPVGKALSDACMGTIASFLSKYQDIIIEHQKVVKGNQKRLESLRELAGKENLEYPSVTLPPQPHTKEGVDAYNEVIARVRMWVNLNLWQKLKLSRDDAKPLLRLKGFPSFPLVERQANEVDWWDMVCNVKKLINEKKEDGKVFWQNLAGYKRQEALRPYLSSEEDRKKGKKFARYQLGDLLLHLEKKHGEDWGKVYDEAWERIDKKVEGLSKHIKLEEERRSEDAQSKAALTDWLRAKASFVIEGLKEADKDEFCRCELKLQKWYGDLRGKPFAIEAENSILDISGFSKQYNCAFIWQKDGVKKLNLYLIINYFKGGKLRFKKIKPEAFEANRFYTVINKKSGEIVPMEVNFNFDDPNLIILPLAFGKRQGREFIWNDLLSLETGSLKLANGRVIEKTLYNRRTRQDEPALFVALTFERREVLDSSNIKPMNLIGVDRGENIPAVIALTDPEGCPLSRFKDSLGNPTHILRIGESYKEKQRTIQAKKEVEQRRAGGYSRKYASKAKNLADDMVRNTARDLLYYAVTQDAMLIFENLSRGFGRQGKRTFMAERQYTRMEDWLTAKLAYEGLPSKTYLSKTLAQYTSKTCSNCGFTITSADYDRVLEKLKKTATGWMTTINGKELKVEGQITYYNRYKRQNVVKDLSVELDRLSEESVNNDISSWTKGRSGEALSLLKKRFSHRPVQEKFVCLNCGFETHADEQAALNIARSWLFLRSQEYKKYQTNKTTGNTDKRAFVETWQSFYRKKLKEVWKPAV

SEQ ID NO: 40063 - protein, 978 aa, Artificial Sequence
  CasX variant
QEIKRINGIRRRLVKDSNTKKAGKTGPMKTLLVRVMTPDLRERLENLRKKPENIPQPISNTSRANLNKLLTDYTEMKKAILHVYWEEFQKDPVGLMSRVAQPASKKIDQNKLKPEMDEKGNLTTAGFACSQCGQPLFVYKLEQVSEKGKAYTNYFGRCNVAEHEKLILLAQLKPEKDSDEAVTYSLGKFGQRALDFYSIHVTKESTHPVKPLAQIAGNRYASGPVGKALSDACMGTIASFLSKYQDIIIEHQKVVKGNQKRLESLRELAGKENLEYPSVTLPPQPHTKEGVDAYNEVIARVRMWVNLNLWQKLKLSRDDAKPLLRLKGFPSFPLVERQANEVDWWDMVCNVKKLINEKKEDGKVFWQNLAGYKRQEALRPYLSSEEDRKKGKKFARYQLGDLLLHLEKKHGEDWGKVYDEAWERIDKKVEGLSKHIKLEEERRSEDAQSKAALTDWLRAKASFVIEGLKEADKDEFCRCELKLQKWYGDLRGKPFAIEAENSILDISGFSKQYNCAFIWQKDGVKKLNLYLIINYFKGGKLRFKKIKPEAFEANRFYTVINKKSGEIVPMEVNFNFDDPNLIILPLAFGKRQGREFIWNDLLSLETGSLKLANGRVIEKTLYNRRTRQDEPALFVALTFERREVLDSSNIKPMNLIGVDRGENIPAVIALTDPEGCPLSRFKDSLGNPTHILRIGESYKEKQRTIQAKKEVEQRRAGGYSRKYASKAKNLADDMVRNTARDLLYYAVTQDAMLIFENLSRGFGRQGKRTFMAERQYTRMEDWLTAKLAYEGLPSKTYLSKTLAQYTSKTCSNCGFTITSADYDRVLEKLKKTATGWMTTINGKELKVEGQITYYNRYKRQNVVKDLSVELDRLSEESVNNDISSWTKGRSGEALSLLKKRFSHRPVQEKFVCLNCGFETHADEQAALNIARSWLFLRSQEYKKYQTNKTTGNTDKRAFVETWQSFYRKKLKEVWKPAV

SEQ ID NO: 40064 - protein, 979 aa, Artificial Sequence
  CasX variant
QEIKRINKIRRRLVKFDSNTKKAGKTGPMKTLLVRVMTPDLRERLENLRKKPENIPQPISNTSRANLNKLLTDYTEMKKAILHVYWEEFQKDPVGLMSRVAQPASKKIDQNKLKPEMDEKGNLTTAGFACSQCGQPLFVYKLEQVSEKGKAYTNYFGRCNVAEHEKLILLAQLKPEKDSDEAVTYSLGKFGQRALDFYSIHVTKESTHPVKPLAQIAGNRYASGPVGKALSDACMGTIASFLSKYQDIIIEHQKVVKGNQKRLESLRELAGKENLEYPSVTLPPQPHTKEGVDAYNEVIARVRMWVNLNLWQKLKLSRDDAKPLLRLKGFPSFPLVERQANEVDWWDMVCNVKKLINEKKEDGKVFWQNLAGYKRQEALRPYLSSEEDRKKGKKFARYQLGDLLLHLEKKHGEDWGKVYDEAWERIDKKVEGLSKHIKLEEERRSEDAQSKAALTDWLRAKASFVIEGLKEADKDEFCRCELKLQKWYGDLRGKPFAIEAENSILDISGFSKQYNCAFIWQKDGVKKLNLYLIINYFKGGKLRFKKIKPEAFEANRFYTVINKKSGEIVPMEVNFNFDDPNLIILPLAFGKRQGREFIWNDLLSLETGSLKLANGRVIEKTLYNRRTRQDEPALFVALTFERREVLDSSNIKPMNLIGVDRGENIPAVIALTDPEGCPLSRFKDSLGNPTHILRIGESYKEKQRTIQAKKEVEQRRAGGYSRKYASKAKNLADDMVRNTARDLLYYAVTQDAMLIFENLSRGFGRQGKRTFMAERQYTRMEDWLTAKLAYEGLPSKTYLSKTLAQYTSKTCSNCGFTITSADYDRVLEKLKKTATGWMTTINGKELKVEGQITYYNRYKRQNVVKDLSVELDRLSEESVNNDISSWTKGRSGEALSLLKKRFSHRPVQEKFVCLNCGFETHADEQAALNIARSWLFLRSQEYKKYQTNKTTGNTDKRAFVETWQSFYRKKLKEVWKPAV

SEQ ID NO: 40065 - protein, 979 aa, Artificial Sequence
  CasX variant
QEIKRINKIRRRLVKDSFNTKKAGKTGPMKTLLVRVMTPDLRERLENLRKKPENIPQPISNTSRANLNKLLTDYTEMKKAILHVYWEEFQKDPVGLMSRVAQPASKKIDQNKLKPEMDEKGNLTTAGFACSQCGQPLFVYKLEQVSEKGKAYTNYFGRCNVAEHEKLILLAQLKPEKDSDEAVTYSLGKFGQRALDFYSIHVTKESTHPVKPLAQIAGNRYASGPVGKALSDACMGTIASFLSKYQDIIIEHQKVVKGNQKRLESLRELAGKENLEYPSVTLPPQPHTKEGVDAYNEVIARVRMWVNLNLWQKLKLSRDDAKPLLRLKGFPSFPLVERQANEVDWWDMVCNVKKLINEKKEDGKVFWQNLAGYKRQEALRPYLSSEEDRKKGKKFARYQLGDLLLHLEKKHGEDWGKVYDEAWERIDKKVEGLSKHIKLEEERRSEDAQSKAALTDWLRAKASFVIEGLKEADKDEFCRCELKLQKWYGDLRGKPFAIEAENSILDISGFSKQYNCAFIWQKDGVKKLNLYLIINYFKGGKLRFKKIKPEAFEANRFYTVINKKSGEIVPMEVNFNFDDPNLIILPLAFGKRQGREFIWNDLLSLETGSLKLANGRVIEKTLYNRRTRQDEPALFVALTFERREVLDSSNIKPMNLIGVDRGENIPAVIALTDPEGCPLSRFKDSLGNPTHILRIGESYKEKQRTIQAKKEVEQRRAGGYSRKYASKAKNLADDMVRNTARDLLYYAVTQDAMLIFENLSRGFGRQGKRTFMAERQYTRMEDWLTAKLAYEGLPSKTYLSKTLAQYTSKTCSNCGFTITSADYDRVLEKLKKTATGWMTTINGKELKVEGQITYYNRYKRQNVVKDLSVELDRLSEESVNNDISSWTKGRSGEALSLLKKRFSHRPVQEKFVCLNCGFETHADEQAALNIARSWLFLRSQEYKKYQTNKTTGNTDKRAFVETWQSFYRKKLKEVWKPAV

SEQ ID NO: 40066 - protein, 978 aa, Artificial Sequence
  CasX variant
QEIKRINKIRRRLVKDSNTKKAGKTGPMKTLLVPVMTPDLRERLENLRKKPENIPQPISNTSRANLNKLLTDYTEMKKAILHVYWEEFQKDPVGLMSRVAQPASKKIDQNKLKPEMDEKGNLTTAGFACSQCGQPLFVYKLEQVSEKGKAYTNYFGRCNVAEHEKLILLAQLKPEKDSDEAVTYSLGKFGQRALDFYSIHVTKESTHPVKPLAQIAGNRYASGPVGKALSDACMGTIASFLSKYQDIIIEHQKVVKGNQKRLESLRELAGKENLEYPSVTLPPQPHTKEGVDAYNEVIARVRMWVNLNLWQKLKLSRDDAKPLLRLKGFPSFPLVERQANEVDWWDMVCNVKKLINEKKEDGKVFWQNLAGYKRQEALRPYLSSEEDRKKGKKFARYQLGDLLLHLEKKHGEDWGKVYDEAWERIDKKVEGLSKHIKLEEERRSEDAQSKAALTDWLRAKASFVIEGLKEADKDEFCRCELKLQKWYGDLRGKPFAIEAENSILDISGFSKQYNCAFIWQKDGVKKLNLYLIINYFKGGKLRFKKIKPEAFEANRFYTVINKKSGEIVPMEVNFNFDDPNLIILPLAFGKRQGREFIWNDLLSLETGSLKLANGRVIEKTLYNRRTRQDEPALFVALTFERREVLDSSNIKPMNLIGVDRGENIPAVIALTDPEGCPLSRFKDSLGNPTHILRIGESYKEKQRTIQAKKEVEQRRAGGYSRKYASKAKNLADDMVRNTARDLLYYAVTQDAMLIFENLSRGFGRQGKRTFMAERQYTRMEDWLTAKLAYEGLPSKTYLSKTLAQYTSKTCSNCGFTITSADYDRVLEKLKKTATGWMTTINGKELKVEGQITYYNRYKRQNVVKDLSVELDRLSEESVNNDISSWTKGRSGEALSLLKKRFSHRPVQEKFVCLNCGFETHADEQAALNIARSWLFLRSQEYKKYQTNKTTGNTDKRAFVETWQSFYRKKLKEVWKPAV

SEQ ID NO: 40067 - protein, 978 aa, Artificial Sequence
  CasX variant
QEIKRINKIRRRLVKDSNTKKAGKTGPMKTLLVRVMTPDLRERLENLRKKPPNIPQPISNTSRANLNKLLTDYTEMKKAILHVYWEEFQKDPVGLMSRVAQPASKKIDQNKLKPEMDEKGNLTTAGFACSQCGQPLFVYKLEQVSEKGKAYTNYFGRCNVAEHEKLILLAQLKPEKDSDEAVTYSLGKFGQRALDFYSIHVTKESTHPVKPLAQIAGNRYASGPVGKALSDACMGTIASFLSKYQDIIIEHQKVVKGNQKRLESLRELAGKENLEYPSVTLPPQPHTKEGVDAYNEVIARVRMWVNLNLWQKLKLSRDDAKPLLRLKGFPSFPLVERQANEVDWWDMVCNVKKLINEKKEDGKVFWQNLAGYKRQEALRPYLSSEEDRKKGKKFARYQLGDLLLHLEKKHGEDWGKVYDEAWERIDKKVEGLSKHIKLEEERRSEDAQSKAALTDWLRAKASFVIEGLKEADKDEFCRCELKLQKWYGDLRGKPFAIEAENSILDISGFSKQYNCAFIWQKDGVKKLNLYLIINYFKGGKLRFKKIKPEAFEANRFYTVINKKSGEIVPMEVNFNFDDPNLIILPLAFGKRQGREFIWNDLLSLETGSLKLANGRVIEKTLYNRRTRQDEPALFVALTFERREVLDSSNIKPMNLIGVDRGENIPAVIALTDPEGCPLSRFKDSLGNPTHILRIGESYKEKQRTIQAKKEVEQRRAGGYSRKYASKAKNLADDMVRNTARDLLYYAVTQDAMLIFENLSRGFGRQGKRTFMAERQYTRMEDWLTAKLAYEGLPSKTYLSKTLAQYTSKTCSNCGFTITSADYDRVLEKLKKTATGWMTTINGKELKVEGQITYYNRYKRQNVVKDLSVELDRLSEESVNNDISSWTKGRSGEALSLLKKRFSHRPVQEKFVCLNCGFETHADEQAALNIARSWLFLRSQEYKKYQTNKTTGNTDKRAFVETWQSFYRKKLKEVWKPAV

SEQ ID NO: 40068 - protein, 979 aa, Artificial Sequence
  CasX variant
QEIKRINKIRRRLVKDSNTKKAGKTGPMKTLLVRVMTPDLRERLENLRKKPENIPPQPISNTSRANLNKLLTDYTEMKKAILHVYWEEFQKDPVGLMSRVAQPASKKIDQNKLKPEMDEKGNLTTAGFACSQCGQPLFVYKLEQVSEKGKAYTNYFGRCNVAEHEKLILLAQLKPEKDSDEAVTYSLGKFGQRALDFYSIHVTKESTHPVKPLAQIAGNRYASGPVGKALSDACMGTIASFLSKYQDIIIEHQKVVKGNQKRLESLRELAGKENLEYPSVTLPPQPHTKEGVDAYNEVIARVRMWVNLNLWQKLKLSRDDAKPLLRLKGFPSFPLVERQANEVDWWDMVCNVKKLINEKKEDGKVFWQNLAGYKRQEALRPYLSSEEDRKKGKKFARYQLGDLLLHLEKKHGEDWGKVYDEAWERIDKKVEGLSKHIKLEEERRSEDAQSKAALTDWLRAKASFVIEGLKEADKDEFCRCELKLQKWYGDLRGKPFAIEAENSILDISGFSKQYNCAFIWQKDGVKKLNLYLIINYFKGGKLRFKKIKPEAFEANRFYTVINKKSGEIVPMEVNFNFDDPNLIILPLAFGKRQGREFIWNDLLSLETGSLKLANGRVIEKTLYNRRTRQDEPALFVALTFERREVLDSSNIKPMNLIGVDRGENIPAVIALTDPEGCPLSRFKDSLGNPTHILRIGESYKEKQRTIQAKKEVEQRRAGGYSRKYASKAKNLADDMVRNTARDLLYYAVTQDAMLIFENLSRGFGRQGKRTFMAERQYTRMEDWLTAKLAYEGLPSKTYLSKTLAQYTSKTCSNCGFTITSADYDRVLEKLKKTATGWMTTINGKELKVEGQITYYNRYKRQNVVKDLSVELDRLSEESVNNDISSWTKGRSGEALSLLKKRFSHRPVQEKFVCLNCGFETHADEQAALNIARSWLFLRSQEYKKYQTNKTTGNTDKRAFVETWQSFYRKKLKEVWKPAV

SEQ ID NO: 40069 - protein, 978 aa, Artificial Sequence
  CasX variant
QEIKRINKIRRRLVKDSNTKKAGKTGPMKTLLVRVMTPDLRERLENLRKKPENIPPPISNTSRANLNKLLTDYTEMKKAILHVYWEEFQKDPVGLMSRVAQPASKKIDQNKLKPEMDEKGNLTTAGFACSQCGQPLFVYKLEQVSEKGKAYTNYFGRCNVAEHEKLILLAQLKPEKDSDEAVTYSLGKFGQRALDFYSIHVTKESTHPVKPLAQIAGNRYASGPVGKALSDACMGTIASFLSKYQDIIIEHQKVVKGNQKRLESLRELAGKENLEYPSVTLPPQPHTKEGVDAYNEVIARVRMWVNLNLWQKLKLSRDDAKPLLRLKGFPSFPLVERQANEVDWWDMVCNVKKLINEKKEDGKVFWQNLAGYKRQEALRPYLSSEEDRKKGKKFARYQLGDLLLHLEKKHGEDWGKVYDEAWERIDKKVEGLSKHIKLEEERRSEDAQSKAALTDWLRAKASFVIEGLKEADKDEFCRCELKLQKWYGDLRGKPFAIEAENSILDISGFSKQYNCAFIWQKDGVKKLNLYLIINYFKGGKLRFKKIKPEAFEANRFYTVINKKSGEIVPMEVNFNFDDPNLIILPLAFGKRQGREFIWNDLLSLETGSLKLANGRVIEKTLYNRRTRQDEPALFVALTFERREVLDSSNIKPMNLIGVDRGENIPAVIALTDPEGCPLSRFKDSLGNPTHILRIGESYKEKQRTIQAKKEVEQRRAGGYSRKYASKAKNLADDMVRNTARDLLYYAVTQDAMLIFENLSRGFGRQGKRTFMAERQYTRMEDWLTAKLAYEGLPSKTYLSKTLAQYTSKTCSNCGFTITSADYDRVLEKLKKTATGWMTTINGKELKVEGQITYYNRYKRQNVVKDLSVELDRLSEESVNNDISSWTKGRSGEALSLLKKRFSHRPVQEKFVCLNCGFETHADEQAALNIARSWLFLRSQEYKKYQTNKTTGNTDKRAFVETWQSFYRKKLKEVWKPAV

SEQ ID NO: 40070 - protein, 978 aa, Artificial Sequence
  CasX variant
QEIKRINKIRRRLVKDSNTKKAGKTGPMKTLLVRVMTPDLRERLENLRKKPENIPQPISNTSSANLNKLLTDYTEMKKAILHVYWEEFQKDPVGLMSRVAQPASKKIDQNKLKPEMDEKGNLTTAGFACSQCGQPLFVYKLEQVSEKGKAYTNYFGRCNVAEHEKLILLAQLKPEKDSDEAVTYSLGKFGQRALDFYSIHVTKESTHPVKPLAQIAGNRYASGPVGKALSDACMGTIASFLSKYQDIIIEHQKVVKGNQKRLESLRELAGKENLEYPSVTLPPQPHTKEGVDAYNEVIARVRMWVNLNLWQKLKLSRDDAKPLLRLKGFPSFPLVERQANEVDWWDMVCNVKKLINEKKEDGKVFWQNLAGYKRQEALRPYLSSEEDRKKGKKFARYQLGDLLLHLEKKHGEDWGKVYDEAWERIDKKVEGLSKHIKLEEERRSEDAQSKAALTDWLRAKASFVIEGLKEADKDEFCRCELKLQKWYGDLRGKPFAIEAENSILDISGFSKQYNCAFIWQKDGVKKLNLYLIINYFKGGKLRFKKIKPEAFEANRFYTVINKKSGEIVPMEVNFNFDDPNLIILPLAFGKRQGREFIWNDLLSLETGSLKLANGRVIEKTLYNRRTRQDEPALFVALTFERREVLDSSNIKPMNLIGVDRGENIPAVIALTDPEGCPLSRFKDSLGNPTHILRIGESYKEKQRTIQAKKEVEQRRAGGYSRKYASKAKNLADDMVRNTARDLLYYAVTQDAMLIFENLSRGFGRQGKRTFMAERQYTRMEDWLTAKLAYEGLPSKTYLSKTLAQYTSKTCSNCGFTITSADYDRVLEKLKKTATGWMTTINGKELKVEGQITYYNRYKRQNVVKDLSVELDRLSEESVNNDISSWTKGRSGEALSLLKKRFSHRPVQEKFVCLNCGFETHADEQAALNIARSWLFLRSQEYKKYQTNKTTGNTDKRAFVETWQSFYRKKLKEVWKPAV

SEQ ID NO: 40071 - protein, 978 aa, Artificial Sequence
  CasX variant
QEIKRINKIRRRLVKDSNTKKAGKTGPMKTLLVRVMTPDLRERLENLRKKPENIPQPISNTSQANLNKLLTDYTEMKKAILHVYWEEFQKDPVGLMSRVAQPASKKIDQNKLKPEMDEKGNLTTAGFACSQCGQPLFVYKLEQVSEKGKAYTNYFGRCNVAEHEKLILLAQLKPEKDSDEAVTYSLGKFGQRALDFYSIHVTKESTHPVKPLAQIAGNRYASGPVGKALSDACMGTIASFLSKYQDIIIEHQKVVKGNQKRLESLRELAGKENLEYPSVTLPPQPHTKEGVDAYNEVIARVRMWVNLNLWQKLKLSRDDAKPLLRLKGFPSFPLVERQANEVDWWDMVCNVKKLINEKKEDGKVFWQNLAGYKRQEALRPYLSSEEDRKKGKKFARYQLGDLLLHLEKKHGEDWGKVYDEAWERIDKKVEGLSKHIKLEEERRSEDAQSKAALTDWLRAKASFVIEGLKEADKDEFCRCELKLQKWYGDLRGKPFAIEAENSILDISGFSKQYNCAFIWQKDGVKKLNLYLIINYFKGGKLRFKKIKPEAFEANRFYTVINKKSGEIVPMEVNFNFDDPNLIILPLAFGKRQGREFIWNDLLSLETGSLKLANGRVIEKTLYNRRTRQDEPALFVALTFERREVLDSSNIKPMNLIGVDRGENIPAVIALTDPEGCPLSRFKDSLGNPTHILRIGESYKEKQRTIQAKKEVEQRRAGGYSRKYASKAKNLADDMVRNTARDLLYYAVTQDAMLIFENLSRGFGRQGKRTFMAERQYTRMEDWLTAKLAYEGLPSKTYLSKTLAQYTSKTCSNCGFTITSADYDRVLEKLKKTATGWMTTINGKELKVEGQITYYNRYKRQNVVKDLSVELDRLSEESVNNDISSWTKGRSGEALSLLKKRFSHRPVQEKFVCLNCGFETHADEQAALNIARSWLFLRSQEYKKYQTNKTTGNTDKRAFVETWQSFYRKKLKEVWKPAV

SEQ ID NO: 40072 - protein, 978 aa, Artificial Sequence
  CasX variant
QEIKRINKIRRRLVKDSNTKKAGKTGPMKTLLVRVMTPDLRERLENLRKKPENIPQPISNTSRANLNKLLTDYTEMKKAITHVYWEEFQKDPVGLMSRVAQPASKKIDQNKLKPEMDEKGNLTTAGFACSQCGQPLFVYKLEQVSEKGKAYTNYFGRCNVAEHEKLILLAQLKPEKDSDEAVTYSLGKFGQRALDFYSIHVTKESTHPVKPLAQIAGNRYASGPVGKALSDACMGTIASFLSKYQDIIIEHQKVVKGNQKRLESLRELAGKENLEYPSVTLPPQPHTKEGVDAYNEVIARVRMWVNLNLWQKLKLSRDDAKPLLRLKGFPSFPLVERQANEVDWWDMVCNVKKLINEKKEDGKVFWQNLAGYKRQEALRPYLSSEEDRKKGKKFARYQLGDLLLHLEKKHGEDWGKVYDEAWERIDKKVEGLSKHIKLEEERRSEDAQSKAALTDWLRAKASFVIEGLKEADKDEFCRCELKLQKWYGDLRGKPFAIEAENSILDISGFSKQYNCAFIWQKDGVKKLNLYLIINYFKGGKLRFKKIKPEAFEANRFYTVINKKSGEIVPMEVNFNFDDPNLIILPLAFGKRQGREFIWNDLLSLETGSLKLANGRVIEKTLYNRRTRQDEPALFVALTFERREVLDSSNIKPMNLIGVDRGENIPAVIALTDPEGCPLSRFKDSLGNPTHILRIGESYKEKQRTIQAKKEVEQRRAGGYSRKYASKAKNLADDMVRNTARDLLYYAVTQDAMLIFENLSRGFGRQGKRTFMAERQYTRMEDWLTAKLAYEGLPSKTYLSKTLAQYTSKTCSNCGFTITSADYDRVLEKLKKTATGWMTTINGKELKVEGQITYYNRYKRQNVVKDLSVELDRLSEESVNNDISSWTKGRSGEALSLLKKRFSHRPVQEKFVCLNCGFETHADEQAALNIARSWLFLRSQEYKKYQTNKTTGNTDKRAFVETWQSFYRKKLKEVWKPAV

SEQ ID NO: 40073 - protein, 978 aa, Artificial Sequence
  CasX variant
QEIKRINKIRRRLVKDSNTKKAGKTGPMKTLLVRVMTPDLRERLENLRKKPENIPQPISNTSRANLNKLLTDYTEMKKAILHVYGEEFQKDPVGLMSRVAQPASKKIDQNKLKPEMDEKGNLTTAGFACSQCGQPLFVYKLEQVSEKGKAYTNYFGRCNVAEHEKLILLAQLKPEKDSDEAVTYSLGKFGQRALDFYSIHVTKESTHPVKPLAQIAGNRYASGPVGKALSDACMGTIASFLSKYQDIIIEHQKVVKGNQKRLESLRELAGKENLEYPSVTLPPQPHTKEGVDAYNEVIARVRMWVNLNLWQKLKLSRDDAKPLLRLKGFPSFPLVERQANEVDWWDMVCNVKKLINEKKEDGKVFWQNLAGYKRQEALRPYLSSEEDRKKGKKFARYQLGDLLLHLEKKHGEDWGKVYDEAWERIDKKVEGLSKHIKLEEERRSEDAQSKAALTDWLRAKASFVIEGLKEADKDEFCRCELKLQKWYGDLRGKPFAIEAENSILDISGFSKQYNCAFIWQKDGVKKLNLYLIINYFKGGKLRFKKIKPEAFEANRFYTVINKKSGEIVPMEVNFNFDDPNLIILPLAFGKRQGREFIWNDLLSLETGSLKLANGRVIEKTLYNRRTRQDEPALFVALTFERREVLDSSNIKPMNLIGVDRGENIPAVIALTDPEGCPLSRFKDSLGNPTHILRIGESYKEKQRTIQAKKEVEQRRAGGYSRKYASKAKNLADDMVRNTARDLLYYAVTQDAMLIFENLSRGFGRQGKRTFMAERQYTRMEDWLTAKLAYEGLPSKTYLSKTLAQYTSKTCSNCGFTITSADYDRVLEKLKKTATGWMTTINGKELKVEGQITYYNRYKRQNVVKDLSVELDRLSEESVNNDISSWTKGRSGEALSLLKKRFSHRPVQEKFVCLNCGFETHADEQAALNIARSWLFLRSQEYKKYQTNKTTGNTDKRAFVETWQSFYRKKLKEVWKPAV

SEQ ID NO: 40074 - protein, 978 aa, Artificial Sequence
  CasX variant
QEIKRINKIRRRLVKDSNTKKAGKTGPMKTLLVRVMTPDLRERLENLRKKPENIPQPISNTSRANLNKLLTDYTEMKKAILHVYDEEFQKDPVGLMSRVAQPASKKIDQNKLKPEMDEKGNLTTAGFACSQCGQPLFVYKLEQVSEKGKAYTNYFGRCNVAEHEKLILLAQLKPEKDSDEAVTYSLGKFGQRALDFYSIHVTKESTHPVKPLAQIAGNRYASGPVGKALSDACMGTIASFLSKYQDIIIEHQKVVKGNQKRLESLRELAGKENLEYPSVTLPPQPHTKEGVDAYNEVIARVRMWVNLNLWQKLKLSRDDAKPLLRLKGFPSFPLVERQANEVDWWDMVCNVKKLINEKKEDGKVFWQNLAGYKRQEALRPYLSSEEDRKKGKKFARYQLGDLLLHLEKKHGEDWGKVYDEAWERIDKKVEGLSKHIKLEEERRSEDAQSKAALTDWLRAKASFVIEGLKEADKDEFCRCELKLQKWYGDLRGKPFAIEAENSILDISGFSKQYNCAFIWQKDGVKKLNLYLIINYFKGGKLRFKKIKPEAFEANRFYTVINKKSGEIVPMEVNFNFDDPNLIILPLAFGKRQGREFIWNDLLSLETGSLKLANGRVIEKTLYNRRTRQDEPALFVALTFERREVLDSSNIKPMNLIGVDRGENIPAVIALTDPEGCPLSRFKDSLGNPTHILRIGESYKEKQRTIQAKKEVEQRRAGGYSRKYASKAKNLADDMVRNTARDLLYYAVTQDAMLIFENLSRGFGRQGKRTFMAERQYTRMEDWLTAKLAYEGLPSKTYLSKTLAQYTSKTCSNCGFTITSADYDRVLEKLKKTATGWMTTINGKELKVEGQITYYNRYKRQNVVKDLSVELDRLSEESVNNDISSWTKGRSGEALSLLKKRFSHRPVQEKFVCLNCGFETHADEQAALNIARSWLFLRSQEYKKYQTNKTTGNTDKRAFVETWQSFYRKKLKEVWKPAV

SEQ ID NO: 40075 - protein, 978 aa, Artificial Sequence
  CasX variant
QEIKRINKIRRRLVKDSNTKKAGKTGPMKTLLVRVMTPDLRERLENLRKKPENIPQPISNTSRANLNKLLTDYTEMKKAILHVYAEEFQKDPVGLMSRVAQPASKKIDQNKLKPEMDEKGNLTTAGFACSQCGQPLFVYKLEQVSEKGKAYTNYFGRCNVAEHEKLILLAQLKPEKDSDEAVTYSLGKFGQRALDFYSIHVTKESTHPVKPLAQIAGNRYASGPVGKALSDACMGTIASFLSKYQDIIIEHQKVVKGNQKRLESLRELAGKENLEYPSVTLPPQPHTKEGVDAYNEVIARVRMWVNLNLWQKLKLSRDDAKPLLRLKGFPSFPLVERQANEVDWWDMVCNVKKLINEKKEDGKVFWQNLAGYKRQEALRPYLSSEEDRKKGKKFARYQLGDLLLHLEKKHGEDWGKVYDEAWERIDKKVEGLSKHIKLEEERRSEDAQSKAALTDWLRAKASFVIEGLKEADKDEFCRCELKLQKWYGDLRGKPFAIEAENSILDISGFSKQYNCAFIWQKDGVKKLNLYLIINYFKGGKLRFKKIKPEAFEANRFYTVINKKSGEIVPMEVNFNFDDPNLIILPLAFGKRQGREFIWNDLLSLETGSLKLANGRVIEKTLYNRRTRQDEPALFVALTFERREVLDSSNIKPMNLIGVDRGENIPAVIALTDPEGCPLSRFKDSLGNPTHILRIGESYKEKQRTIQAKKEVEQRRAGGYSRKYASKAKNLADDMVRNTARDLLYYAVTQDAMLIFENLSRGFGRQGKRTFMAERQYTRMEDWLTAKLAYEGLPSKTYLSKTLAQYTSKTCSNCGFTITSADYDRVLEKLKKTATGWMTTINGKELKVEGQITYYNRYKRQNVVKDLSVELDRLSEESVNNDISSWTKGRSGEALSLLKKRFSHRPVQEKFVCLNCGFETHADEQAALNIARSWLFLRSQEYKKYQTNKTTGNTDKRAFVETWQSFYRKKLKEVWKPAV

SEQ ID NO: 40076 - protein, 978 aa, Artificial Sequence
  CasX variant
QEIKRINKIRRRLVKDSNTKKAGKTGPMKTLLVRVMTPDLRERLENLRKKPENIPQPISNTSRANLNKLLTDYTEMKKAILHVYREEFQKDPVGLMSRVAQPASKKIDQNKLKPEMDEKGNLTTAGFACSQCGQPLFVYKLEQVSEKGKAYTNYFGRCNVAEHEKLILLAQLKPEKDSDEAVTYSLGKFGQRALDFYSIHVTKESTHPVKPLAQIAGNRYASGPVGKALSDACMGTIASFLSKYQDIIIEHQKVVKGNQKRLESLRELAGKENLEYPSVTLPPQPHTKEGVDAYNEVIARVRMWVNLNLWQKLKLSRDDAKPLLRLKGFPSFPLVERQANEVDWWDMVCNVKKLINEKKEDGKVFWQNLAGYKRQEALRPYLSSEEDRKKGKKFARYQLGDLLLHLEKKHGEDWGKVYDEAWERIDKKVEGLSKHIKLEEERRSEDAQSKAALTDWLRAKASFVIEGLKEADKDEFCRCELKLQKWYGDLRGKPFAIEAENSILDISGFSKQYNCAFIWQKDGVKKLNLYLIINYFKGGKLRFKKIKPEAFEANRFYTVINKKSGEIVPMEVNFNFDDPNLIILPLAFGKRQGREFIWNDLLSLETGSLKLANGRVIEKTLYNRRTRQDEPALFVALTFERREVLDSSNIKPMNLIGVDRGENIPAVIALTDPEGCPLSRFKDSLGNPTHILRIGESYKEKQRTIQAKKEVEQRRAGGYSRKYASKAKNLADDMVRNTARDLLYYAVTQDAMLIFENLSRGFGRQGKRTFMAERQYTRMEDWLTAKLAYEGLPSKTYLSKTLAQYTSKTCSNCGFTITSADYDRVLEKLKKTATGWMTTINGKELKVEGQITYYNRYKRQNVVKDLSVELDRLSEESVNNDISSWTKGRSGEALSLLKKRFSHRPVQEKFVCLNCGFETHADEQAALNIARSWLFLRSQEYKKYQTNKTTGNTDKRAFVETWQSFYRKKLKEVWKPAV

SEQ ID NO: 40077 - protein, 978 aa, Artificial Sequence
  CasX variant
QEIKRINKIRRRLVKDSNTKKAGKTGPMKTLLVRVMTPDLRERLENLRKKPENIPQPISNTSRANLNKLLTDYTEMKKAILHVYWEEFQKDPVGLMSRVAQPASKKIDQNKLKPEMDEKGNLTTAGFACSQCGQPLFVYKLEQVSEKGKAYTNYFGRCNVAEHEKLIKLAQLKPEKDSDEAVTYSLGKFGQRALDFYSIHVTKESTHPVKPLAQIAGNRYASGPVGKALSDACMGTIASFLSKYQDIIIEHQKVVKGNQKRLESLRELAGKENLEYPSVTLPPQPHTKEGVDAYNEVIARVRMWVNLNLWQKLKLSRDDAKPLLRLKGFPSFPLVERQANEVDWWDMVCNVKKLINEKKEDGKVFWQNLAGYKRQEALRPYLSSEEDRKKGKKFARYQLGDLLLHLEKKHGEDWGKVYDEAWERIDKKVEGLSKHIKLEEERRSEDAQSKAALTDWLRAKASFVIEGLKEADKDEFCRCELKLQKWYGDLRGKPFAIEAENSILDISGFSKQYNCAFIWQKDGVKKLNLYLIINYFKGGKLRFKKIKPEAFEANRFYTVINKKSGEIVPMEVNFNFDDPNLIILPLAFGKRQGREFIWNDLLSLETGSLKLANGRVIEKTLYNRRTRQDEPALFVALTFERREVLDSSNIKPMNLIGVDRGENIPAVIALTDPEGCPLSRFKDSLGNPTHILRIGESYKEKQRTIQAKKEVEQRRAGGYSRKYASKAKNLADDMVRNTARDLLYYAVTQDAMLIFENLSRGFGRQGKRTFMAERQYTRMEDWLTAKLAYEGLPSKTYLSKTLAQYTSKTCSNCGFTITSADYDRVLEKLKKTATGWMTTINGKELKVEGQITYYNRYKRQNVVKDLSVELDRLSEESVNNDISSWTKGRSGEALSLLKKRFSHRPVQEKFVCLNCGFETHADEQAALNIARSWLFLRSQEYKKYQTNKTTGNTDKRAFVETWQSFYRKKLKEVWKPAV

SEQ ID NO: 40078 - protein, 978 aa, Artificial Sequence
  CasX variant
QEIKRINKIRRRLVKDSNTKKAGKTGPMKTLLVRVMTPDLRERLENLRKKPENIPQPISNTSRANLNKLLTDYTEMKKAILHVYWEEFQKDPVGLMSRVAQPASKKIDQNKLKPEMDEKGNLTTAGFACSQCGQPLFVYKLEQVSEKGKAYTNYFGRCNVAEHEKLILLYQLKPEKDSDEAVTYSLGKFGQRALDFYSIHVTKESTHPVKPLAQIAGNRYASGPVGKALSDACMGTIASFLSKYQDIIIEHQKVVKGNQKRLESLRELAGKENLEYPSVTLPPQPHTKEGVDAYNEVIARVRMWVNLNLWQKLKLSRDDAKPLLRLKGFPSFPLVERQANEVDWWDMVCNVKKLINEKKEDGKVFWQNLAGYKRQEALRPYLSSEEDRKKGKKFARYQLGDLLLHLEKKHGEDWGKVYDEAWERIDKKVEGLSKHIKLEEERRSEDAQSKAALTDWLRAKASFVIEGLKEADKDEFCRCELKLQKWYGDLRGKPFAIEAENSILDISGFSKQYNCAFIWQKDGVKKLNLYLIINYFKGGKLRFKKIKPEAFEANRFYTVINKKSGEIVPMEVNFNFDDPNLIILPLAFGKRQGREFIWNDLLSLETGSLKLANGRVIEKTLYNRRTRQDEPALFVALTFERREVLDSSNIKPMNLIGVDRGENIPAVIALTDPEGCPLSRFKDSLGNPTHILRIGESYKEKQRTIQAKKEVEQRRAGGYSRKYASKAKNLADDMVRNTARDLLYYAVTQDAMLIFENLSRGFGRQGKRTFMAERQYTRMEDWLTAKLAYEGLPSKTYLSKTLAQYTSKTCSNCGFTITSADYDRVLEKLKKTATGWMTTINGKELKVEGQITYYNRYKRQNVVKDLSVELDRLSEESVNNDISSWTKGRSGEALSLLKKRFSHRPVQEKFVCLNCGFETHADEQAALNIARSWLFLRSQEYKKYQTNKTTGNTDKRAFVETWQSFYRKKLKEVWKPAV

SEQ ID NO: 40079 - protein, 978 aa, Artificial Sequence
  CasX variant
QEIKRINKIRRRLVKDSNTKKAGKTGPMKTLLVRVMTPDLRERLENLRKKPENIPQPISNTSRANLNKLLTDYTEMKKAILHVYWEEFQKDPVGLMSRVAQPASKKIDQNKLKPEMDEKGNLTTAGFACSQCGQPLFVYKLEQVSEKGKAYTNYFGRCNVAEHEKLILLSQLKPEKDSDEAVTYSLGKFGQRALDFYSIHVTKESTHPVKPLAQIAGNRYASGPVGKALSDACMGTIASFLSKYQDIIIEHQKVVKGNQKRLESLRELAGKENLEYPSVTLPPQPHTKEGVDAYNEVIARVRMWVNLNLWQKLKLSRDDAKPLLRLKGFPSFPLVERQANEVDWWDMVCNVKKLINEKKEDGKVFWQNLAGYKRQEALRPYLSSEEDRKKGKKFARYQLGDLLLHLEKKHGEDWGKVYDEAWERIDKKVEGLSKHIKLEEERRSEDAQSKAALTDWLRAKASFVIEGLKEADKDEFCRCELKLQKWYGDLRGKPFAIEAENSILDISGFSKQYNCAFIWQKDGVKKLNLYLIINYFKGGKLRFKKIKPEAFEANRFYTVINKKSGEIVPMEVNFNFDDPNLIILPLAFGKRQGREFIWNDLLSLETGSLKLANGRVIEKTLYNRRTRQDEPALFVALTFERREVLDSSNIKPMNLIGVDRGENIPAVIALTDPEGCPLSRFKDSLGNPTHILRIGESYKEKQRTIQAKKEVEQRRAGGYSRKYASKAKNLADDMVRNTARDLLYYAVTQDAMLIFENLSRGFGRQGKRTFMAERQYTRMEDWLTAKLAYEGLPSKTYLSKTLAQYTSKTCSNCGFTITSADYDRVLEKLKKTATGWMTTINGKELKVEGQITYYNRYKRQNVVKDLSVELDRLSEESVNNDISSWTKGRSGEALSLLKKRFSHRPVQEKFVCLNCGFETHADEQAALNIARSWLFLRSQEYKKYQTNKTTGNTDKRAFVETWQSFYRKKLKEVWKPAV

SEQ ID NO: 40080 - protein, 978 aa, Artificial Sequence
  CasX variant
QEIKRINKIRRRLVKDSNTKKAGKTGPMKTLLVRVMTPDLRERLENLRKKPENIPQPISNTSRANLNKLLTDYTEMKKAILHVYWEEFQKDPVGLMSRVAQPASKKIDQNKLKPEMDEKGNLTTAGFACSQCGQPLFVYKLEQVSEKGKAYTNYFGRCNVAEHEKLILLAQLKPPKDSDEAVTYSLGKFGQRALDFYSIHVTKESTHPVKPLAQIAGNRYASGPVGKALSDACMGTIASFLSKYQDIIIEHQKVVKGNQKRLESLRELAGKENLEYPSVTLPPQPHTKEGVDAYNEVIARVRMWVNLNLWQKLKLSRDDAKPLLRLKGFPSFPLVERQANEVDWWDMVCNVKKLINEKKEDGKVFWQNLAGYKRQEALRPYLSSEEDRKKGKKFARYQLGDLLLHLEKKHGEDWGKVYDEAWERIDKKVEGLSKHIKLEEERRSEDAQSKAALTDWLRAKASFVIEGLKEADKDEFCRCELKLQKWYGDLRGKPFAIEAENSILDISGFSKQYNCAFIWQKDGVKKLNLYLIINYFKGGKLRFKKIKPEAFEANRFYTVINKKSGEIVPMEVNFNFDDPNLIILPLAFGKRQGREFIWNDLLSLETGSLKLANGRVIEKTLYNRRTRQDEPALFVALTFERREVLDSSNIKPMNLIGVDRGENIPAVIALTDPEGCPLSRFKDSLGNPTHILRIGESYKEKQRTIQAKKEVEQRRAGGYSRKYASKAKNLADDMVRNTARDLLYYAVTQDAMLIFENLSRGFGRQGKRTFMAERQYTRMEDWLTAKLAYEGLPSKTYLSKTLAQYTSKTCSNCGFTITSADYDRVLEKLKKTATGWMTTINGKELKVEGQITYYNRYKRQNVVKDLSVELDRLSEESVNNDISSWTKGRSGEALSLLKKRFSHRPVQEKFVCLNCGFETHADEQAALNIARSWLFLRSQEYKKYQTNKTTGNTDKRAFVETWQSFYRKKLKEVWKPAV

SEQ ID NO: 40081 - protein, 977 aa, Artificial Sequence
  CasX variant
QEIKRINKIRRRLVKDSNTKKAGKTGPMKTLLVRVMTPDLRERLENLRKKPENIPQPISNTSRANLNKLLTDYTEMKKAILHVYWEEFQKDPVGLMSRVAQPASKKIDQNKLKPEMDEKGNLTTAGFACSQCGQPLFVYKLEQVSEKGKAYTNYFGRCNVAEHEKLILLAQLKPEKDSDEAVTYSLGKFGQRALDFYSIHVTKESTHPVKPLAQIAGNRYASPVGKALSDACMGTIASFLSKYQDIIIEHQKVVKGNQKRLESLRELAGKENLEYPSVTLPPQPHTKEGVDAYNEVIARVRMWVNLNLWQKLKLSRDDAKPLLRLKGFPSFPLVERQANEVDWWDMVCNVKKLINEKKEDGKVFWQNLAGYKRQEALRPYLSSEEDRKKGKKFARYQLGDLLLHLEKKHGEDWGKVYDEAWERIDKKVEGLSKHIKLEEERRSEDAQSKAALTDWLRAKASFVIEGLKEADKDEFCRCELKLQKWYGDLRGKPFAIEAENSILDISGFSKQYNCAFIWQKDGVKKLNLYLIINYFKGGKLRFKKIKPEAFEANRFYTVINKKSGEIVPMEVNFNFDDPNLIILPLAFGKRQGREFIWNDLLSLETGSLKLANGRVIEKTLYNRRTRQDEPALFVALTFERREVLDSSNIKPMNLIGVDRGENIPAVIALTDPEGCPLSRFKDSLGNPTHILRIGESYKEKQRTIQAKKEVEQRRAGGYSRKYASKAKNLADDMVRNTARDLLYYAVTQDAMLIFENLSRGFGRQGKRTFMAERQYTRMEDWLTAKLAYEGLPSKTYLSKTLAQYTSKTCSNCGFTITSADYDRVLEKLKKTATGWMTTINGKELKVEGQITYYNRYKRQNVVKDLSVELDRLSEESVNNDISSWTKGRSGEALSLLKKRFSHRPVQEKFVCLNCGFETHADEQAALNIARSWLFLRSQEYKKYQTNKTTGNTDKRAFVETWQSFYRKKLKEVWKPAV

SEQ ID NO: 40082 - protein, 978 aa, Artificial Sequence; identical to SEQ ID NO: 40030
  CasX variant

SEQ ID NO: 40083 - protein, 978 aa, Artificial Sequence
  CasX variant
QEIKRINKIRRRLVKDSNTKKAGKTGPMKTLLVRVMTPDLRERLENLRKKPENIPQPISNTSRANLNKLLTDYTEMKKAILHVYWEEFQKDPVGLMSRVAQPASKKIDQNKLKPEMDEKGNLTTAGFACSQCGQPLFVYKLEQVSEKGKAYTNYFGRCNVAEHEKLILLAQLKPEKDSDEAVTYSLGKFGQRALDFYSIHVTKESTHPVKPLAQIAGNRYASGPVGKALSDACMGTIASFLSKYQDIIIEHQKVVKGNQKRLESLRELAGKENLEYPSVTLPPQPHTGEGVDAYNEVIARVRMWVNLNLWQKLKLSRDDAKPLLRLKGFPSFPLVERQANEVDWWDMVCNVKKLINEKKEDGKVFWQNLAGYKRQEALRPYLSSEEDRKKGKKFARYQLGDLLLHLEKKHGEDWGKVYDEAWERIDKKVEGLSKHIKLEEERRSEDAQSKAALTDWLRAKASFVIEGLKEADKDEFCRCELKLQKWYGDLRGKPFAIEAENSILDISGFSKQYNCAFIWQKDGVKKLNLYLIINYFKGGKLRFKKIKPEAFEANRFYTVINKKSGEIVPMEVNFNFDDPNLIILPLAFGKRQGREFIWNDLLSLETGSLKLANGRVIEKTLYNRRTRQDEPALFVALTFERREVLDSSNIKPMNLIGVDRGENIPAVIALTDPEGCPLSRFKDSLGNPTHILRIGESYKEKQRTIQAKKEVEQRRAGGYSRKYASKAKNLADDMVRNTARDLLYYAVTQDAMLIFENLSRGFGRQGKRTFMAERQYTRMEDWLTAKLAYEGLPSKTYLSKTLAQYTSKTCSNCGFTITSADYDRVLEKLKKTATGWMTTINGKELKVEGQITYYNRYKRQNVVKDLSVELDRLSEESVNNDISSWTKGRSGEALSLLKKRFSHRPVQEKFVCLNCGFETHADEQAALNIARSWLFLRSQEYKKYQTNKTTGNTDKRAFVETWQSFYRKKLKEVWKPAV

SEQ ID NO: 40084 - protein, 978 aa, Artificial Sequence
  CasX variant
QEIKRINKIRRRLVKDSNTKKAGKTGPMKTLLVRVMTPDLRERLENLRKKPENIPQPISNTSRANLNKLLTDYTEMKKAILHVYWEEFQKDPVGLMSRVAQPASKKIDQNKLKPEMDEKGNLTTAGFACSQCGQPLFVYKLEQVSEKGKAYTNYFGRCNVAEHEKLILLAQLKPEKDSDEAVTYSLGKFGQRALDFYSIHVTKESTHPVKPLAQIAGNRYASGPVGKALSDACMGTIASFLSKYQDIIIEHQKVVKGNQKRLESLRELAGKENLEYPSVTLPPQPHTSEGVDAYNEVIARVRMWVNLNLWQKLKLSRDDAKPLLRLKGFPSFPLVERQANEVDWWDMVCNVKKLINEKKEDGKVFWQNLAGYKRQEALRPYLSSEEDRKKGKKFARYQLGDLLLHLEKKHGEDWGKVYDEAWERIDKKVEGLSKHIKLEEERRSEDAQSKAALTDWLRAKASFVIEGLKEADKDEFCRCELKLQKWYGDLRGKPFAIEAENSILDISGFSKQYNCAFIWQKDGVKKLNLYLIINYFKGGKLRFKKIKPEAFEANRFYTVINKKSGEIVPMEVNFNFDDPNLIILPLAFGKRQGREFIWNDLLSLETGSLKLANGRVIEKTLYNRRTRQDEPALFVALTFERREVLDSSNIKPMNLIGVDRGENIPAVIALTDPEGCPLSRFKDSLGNPTHILRIGESYKEKQRTIQAKKEVEQRRAGGYSRKYASKAKNLADDMVRNTARDLLYYAVTQDAMLIFENLSRGFGRQGKRTFMAERQYTRMEDWLTAKLAYEGLPSKTYLSKTLAQYTSKTCSNCGFTITSADYDRVLEKLKKTATGWMTTINGKELKVEGQITYYNRYKRQNVVKDLSVELDRLSEESVNNDISSWTKGRSGEALSLLKKRFSHRPVQEKFVCLNCGFETHADEQAALNIARSWLFLRSQEYKKYQTNKTTGNTDKRAFVETWQSFYRKKLKEVWKPAV

SEQ ID NO: 40085 - protein, 978 aa, Artificial Sequence
  CasX variant
QEIKRINKIRRRLVKDSNTKKAGKTGPMKTLLVRVMTPDLRERLENLRKKPENIPQPISNTSRANLNKLLTDYTEMKKAILHVYWEEFQKDPVGLMSRVAQPASKKIDQNKLKPEMDEKGNLTTAGFACSQCGQPLFVYKLEQVSEKGKAYTNYFGRCNVAEHEKLILLAQLKPEKDSDEAVTYSLGKFGQRALDFYSIHVTKESTHPVKPLAQIAGNRYASGPVGKALSDACMGTIASFLSKYQDIIIEHQKVVKGNQKRLESLRELAGKENLEYPSVTLPPQPHTKEGLDAYNEVIARVRMWVNLNLWQKLKLSRDDAKPLLRLKGFPSFPLVERQANEVDWWDMVCNVKKLINEKKEDGKVFWQNLAGYKRQEALRPYLSSEEDRKKGKKFARYQLGDLLLHLEKKHGEDWGKVYDEAWERIDKKVEGLSKHIKLEEERRSEDAQSKAALTDWLRAKASFVIEGLKEADKDEFCRCELKLQKWYGDLRGKPFAIEAENSILDISGFSKQYNCAFIWQKDGVKKLNLYLIINYFKGGKLRFKKIKPEAFEANRFYTVINKKSGEIVPMEVNFNFDDPNLIILPLAFGKRQGREFIWNDLLSLETGSLKLANGRVIEKTLYNRRTRQDEPALFVALTFERREVLDSSNIKPMNLIGVDRGENIPAVIALTDPEGCPLSRFKDSLGNPTHILRIGESYKEKQRTIQAKKEVEQRRAGGYSRKYASKAKNLADDMVRNTARDLLYYAVTQDAMLIFENLSRGFGRQGKRTFMAERQYTRMEDWLTAKLAYEGLPSKTYLSKTLAQYTSKTCSNCGFTITSADYDRVLEKLKKTATGWMTTINGKELKVEGQITYYNRYKRQNVVKDLSVELDRLSEESVNNDISSWTKGRSGEALSLLKKRFSHRPVQEKFVCLNCGFETHADEQAALNIARSWLFLRSQEYKKYQTNKTTGNTDKRAFVETWQSFYRKKLKEVWKPAV

SEQ ID NO: 40086 - protein, 978 aa, Artificial Sequence
  CasX variant
QEIKRINKIRRRLVKDSNTKKAGKTGPMKTLLVRVMTPDLRERLENLRKKPENIPQPISNTSRANLNKLLTDYTEMKKAILHVYWEEFQKDPVGLMSRVAQPASKKIDQNKLKPEMDEKGNLTTAGFACSQCGQPLFVYKLEQVSEKGKAYTNYFGRCNVAEHEKLILLAQLKPEKDSDEAVTYSLGKFGQRALDFYSIHVTKESTHPVKPLAQIAGNRYASGPVGKALSDACMGTIASFLSKYQDIIIEHQKVVKGNQKRLESLRELAGKENLEYPSVTLPPQPHTKEGVDAYNEVIARVRTWVNLNLWQKLKLSRDDAKPLLRLKGFPSFPLVERQANEVDWWDMVCNVKKLINEKKEDGKVFWQNLAGYKRQEALRPYLSSEEDRKKGKKFARYQLGDLLLHLEKKHGEDWGKVYDEAWERIDKKVEGLSKHIKLEEERRSEDAQSKAALTDWLRAKASFVIEGLKEADKDEFCRCELKLQKWYGDLRGKPFAIEAENSILDISGFSKQYNCAFIWQKDGVKKLNLYLIINYFKGGKLRFKKIKPEAFEANRFYTVINKKSGEIVPMEVNFNFDDPNLIILPLAFGKRQGREFIWNDLLSLETGSLKLANGRVIEKTLYNRRTRQDEPALFVALTFERREVLDSSNIKPMNLIGVDRGENIPAVIALTDPEGCPLSRFKDSLGNPTHILRIGESYKEKQRTIQAKKEVEQRRAGGYSRKYASKAKNLADDMVRNTARDLLYYAVTQDAMLIFENLSRGFGRQGKRTFMAERQYTRMEDWLTAKLAYEGLPSKTYLSKTLAQYTSKTCSNCGFTITSADYDRVLEKLKKTATGWMTTINGKELKVEGQITYYNRYKRQNVVKDLSVELDRLSEESVNNDISSWTKGRSGEALSLLKKRFSHRPVQEKFVCLNCGFETHADEQAALNIARSWLFLRSQEYKKYQTNKTTGNTDKRAFVETWQSFYRKKLKEVWKPAV

SEQ ID NO: 40087 - protein, 978 aa, Artificial Sequence
  CasX variant
QEIKRINKIRRRLVKDSNTKKAGKTGPMKTLLVRVMTPDLRERLENLRKKPENIPQPISNTSRANLNKLLTDYTEMKKAILHVYWEEFQKDPVGLMSRVAQPASKKIDQNKLKPEMDEKGNLTTAGFACSQCGQPLFVYKLEQVSEKGKAYTNYFGRCNVAEHEKLILLAQLKPEKDSDEAVTYSLGKFGQRALDFYSIHVTKESTHPVKPLAQIAGNRYASGPVGKALSDACMGTIASFLSKYQDIIIEHQKVVKGNQKRLESLRELAGKENLEYPSVTLPPQPHTKEGVDAYNEVIARVRWWVNLNLWQKLKLSRDDAKPLLRLKGFPSFPLVERQANEVDWWDMVCNVKKLINEKKEDGKVFWQNLAGYKRQEALRPYLSSEEDRKKGKKFARYQLGDLLLHLEKKHGEDWGKVYDEAWERIDKKVEGLSKHIKLEEERRSEDAQSKAALTDWLRAKASFVIEGLKEADKDEFCRCELKLQKWYGDLRGKPFAIEAENSILDISGFSKQYNCAFIWQKDGVKKLNLYLIINYFKGGKLRFKKIKPEAFEANRFYTVINKKSGEIVPMEVNFNFDDPNLIILPLAFGKRQGREFIWNDLLSLETGSLKLANGRVIEKTLYNRRTRQDEPALFVALTFERREVLDSSNIKPMNLIGVDRGENIPAVIALTDPEGCPLSRFKDSLGNPTHILRIGESYKEKQRTIQAKKEVEQRRAGGYSRKYASKAKNLADDMVRNTARDLLYYAVTQDAMLIFENLSRGFGRQGKRTFMAERQYTRMEDWLTAKLAYEGLPSKTYLSKTLAQYTSKTCSNCGFTITSADYDRVLEKLKKTATGWMTTINGKELKVEGQITYYNRYKRQNVVKDLSVELDRLSEESVNNDISSWTKGRSGEALSLLKKRFSHRPVQEKFVCLNCGFETHADEQAALNIARSWLFLRSQEYKKYQTNKTTGNTDKRAFVETWQSFYRKKLKEVWKPAV

SEQ ID NO: 40088 - protein, 978 aa, Artificial Sequence
  CasX variant
QEIKRINKIRRRLVKDSNTKKAGKTGPMKTLLVRVMTPDLRERLENLRKKPENIPQPISNTSRANLNKLLTDYTEMKKAILHVYWEEFQKDPVGLMSRVAQPASKKIDQNKLKPEMDEKGNLTTAGFACSQCGQPLFVYKLEQVSEKGKAYTNYFGRCNVAEHEKLILLAQLKPEKDSDEAVTYSLGKFGQRALDFYSIHVTKESTHPVKPLAQIAGNRYASGPVGKALSDACMGTIASFLSKYQDIIIEHQKVVKGNQKRLESLRELAGKENLEYPSVTLPPQPHTKEGVDAYNEVIARVRMWVNLNLWQKLKLSRDDAKPLLRLKNFPSFPLVERQANEVDWWDMVCNVKKLINEKKEDGKVFWQNLAGYKRQEALRPYLSSEEDRKKGKKFARYQLGDLLLHLEKKHGEDWGKVYDEAWERIDKKVEGLSKHIKLEEERRSEDAQSKAALTDWLRAKASFVIEGLKEADKDEFCRCELKLQKWYGDLRGKPFAIEAENSILDISGFSKQYNCAFIWQKDGVKKLNLYLIINYFKGGKLRFKKIKPEAFEANRFYTVINKKSGEIVPMEVNFNFDDPNLIILPLAFGKRQGREFIWNDLLSLETGSLKLANGRVIEKTLYNRRTRQDEPALFVALTFERREVLDSSNIKPMNLIGVDRGENIPAVIALTDPEGCPLSRFKDSLGNPTHILRIGESYKEKQRTIQAKKEVEQRRAGGYSRKYASKAKNLADDMVRNTARDLLYYAVTQDAMLIFENLSRGFGRQGKRTFMAERQYTRMEDWLTAKLAYEGLPSKTYLSKTLAQYTSKTCSNCGFTITSADYDRVLEKLKKTATGWMTTINGKELKVEGQITYYNRYKRQNVVKDLSVELDRLSEESVNNDISSWTKGRSGEALSLLKKRFSHRPVQEKFVCLNCGFETHADEQAALNIARSWLFLRSQEYKKYQTNKTTGNTDKRAFVETWQSFYRKKLKEVWKPAV

SEQ ID NO: 40089 - protein, 978 aa, Artificial Sequence
  CasX variant
QEIKRINKIRRRLVKDSNTKKAGKTGPMKTLLVRVMTPDLRERLENLRKKPENIPQPISNTSRANLNKLLTDYTEMKKAILHVYWEEFQKDPVGLMSRVAQPASKKIDQNKLKPEMDEKGNLTTAGFACSQCGQPLFVYKLEQVSEKGKAYTNYFGRCNVAEHEKLILLAQLKPEKDSDEAVTYSLGKFGQRALDFYSIHVTKESTHPVKPLAQIAGNRYASGPVGKALSDACMGTIASFLSKYQDIIIEHQKVVKGNQKRLESLRELAGKENLEYPSVTLPPQPHTKEGVDAYNEVIARVRMWVNLNLWQKLKLSRDDAKPLLRLKGFPQFPLVERQANEVDWWDMVCNVKKLINEKKEDGKVFWQNLAGYKRQEALRPYLSSEEDRKKGKKFARYQLGDLLLHLEKKHGEDWGKVYDEAWERIDKKVEGLSKHIKLEEERRSEDAQSKAALTDWLRAKASFVIEGLKEADKDEFCRCELKLQKWYGDLRGKPFAIEAENSILDISGFSKQYNCAFIWQKDGVKKLNLYLIINYFKGGKLRFKKIKPEAFEANRFYTVINKKSGEIVPMEVNFNFDDPNLIILPLAFGKRQGREFIWNDLLSLETGSLKLANGRVIEKTLYNRRTRQDEPALFVALTFERREVLDSSNIKPMNLIGVDRGENIPAVIALTDPEGCPLSRFKDSLGNPTHILRIGESYKEKQRTIQAKKEVEQRRAGGYSRKYASKAKNLADDMVRNTARDLLYYAVTQDAMLIFENLSRGFGRQGKRTFMAERQYTRMEDWLTAKLAYEGLPSKTYLSKTLAQYTSKTCSNCGFTITSADYDRVLEKLKKTATGWMTTINGKELKVEGQITYYNRYKRQNVVKDLSVELDRLSEESVNNDISSWTKGRSGEALSLLKKRFSHRPVQEKFVCLNCGFETHADEQAALNIARSWLFLRSQEYKKYQTNKTTGNTDKRAFVETWQSFYRKKLKEVWKPAV

SEQ ID NO: 40090 - protein, 979 aa, Artificial Sequence
  CasX variant
QEIKRINKIRRRLVKDSNTKKAGKTGPMKTLLVRVMTPDLRERLENLRKKPENIPQPISNTSRANLNKLLTDYTEMKKAILHVYWEEFQKDPVGLMSRVAQPASKKIDQNKLKPEMDEKGNLTTAGFACSQCGQPLFVYKLEQVSEKGKAYTNYFGRCNVAEHEKLILLAQLKPEKDSDEAVTYSLGKFGQRALDFYSIHVTKESTHPVKPLAQIAGNRYASGPVGKALSDACMGTIASFLSKYQDIIIEHQKVVKGNQKRLESLRELAGKENLEYPSVTLPPQPHTKEGVDAYNEVIARVRMWVNLNLWQKLKLSRDDAKPLLRLKGFPSFPALVERQANEVDWWDMVCNVKKLINEKKEDGKVFWQNLAGYKRQEALRPYLSSEEDRKKGKKFARYQLGDLLLHLEKKHGEDWGKVYDEAWERIDKKVEGLSKHIKLEEERRSEDAQSKAALTDWLRAKASFVIEGLKEADKDEFCRCELKLQKWYGDLRGKPFAIEAENSILDISGFSKQYNCAFIWQKDGVKKLNLYLIINYFKGGKLRFKKIKPEAFEANRFYTVINKKSGEIVPMEVNFNFDDPNLIILPLAFGKRQGREFIWNDLLSLETGSLKLANGRVIEKTLYNRRTRQDEPALFVALTFERREVLDSSNIKPMNLIGVDRGENIPAVIALTDPEGCPLSRFKDSLGNPTHILRIGESYKEKQRTIQAKKEVEQRRAGGYSRKYASKAKNLADDMVRNTARDLLYYAVTQDAMLIFENLSRGFGRQGKRTFMAERQYTRMEDWLTAKLAYEGLPSKTYLSKTLAQYTSKTCSNCGFTITSADYDRVLEKLKKTATGWMTTINGKELKVEGQITYYNRYKRQNVVKDLSVELDRLSEESVNNDISSWTKGRSGEALSLLKKRFSHRPVQEKFVCLNCGFETHADEQAALNIARSWLFLRSQEYKKYQTNKTTGNTDKRAFVETWQSFYRKKLKEVWKPAV

SEQ ID NO: 40091 - protein, 977 aa, Artificial Sequence
  CasX variant
QEIKRINKIRRRLVKDSNTKKAGKTGPMKTLLVRVMTPDLRERLENLRKKPENIPQPISNTSRANLNKLLTDYTEMKKAILHVYWEEFQKDPVGLMSRVAQPASKKIDQNKLKPEMDEKGNLTTAGFACSQCGQPLFVYKLEQVSEKGKAYTNYFGRCNVAEHEKLILLAQLKPEKDSDEAVTYSLGKFGQRALDFYSIHVTKESTHPVKPLAQIAGNRYASGPVGKALSDACMGTIASFLSKYQDIIIEHQKVVKGNQKRLESLRELAGKENLEYPSVTLPPQPHTKEGVDAYNEVIARVRMWVNLNLWQKLKLSRDDAKPLLRLKGFPSFPLERQANEVDWWDMVCNVKKLINEKKEDGKVFWQNLAGYKRQEALRPYLSSEEDRKKGKKFARYQLGDLLLHLEKKHGEDWGKVYDEAWERIDKKVEGLSKHIKLEEERRSEDAQSKAALTDWLRAKASFVIEGLKEADKDEFCRCELKLQKWYGDLRGKPFAIEAENSILDISGFSKQYNCAFIWQKDGVKKLNLYLIINYFKGGKLRFKKIKPEAFEANRFYTVINKKSGEIVPMEVNFNFDDPNLIILPLAFGKRQGREFIWNDLLSLETGSLKLANGRVIEKTLYNRRTRQDEPALFVALTFERREVLDSSNIKPMNLIGVDRGENIPAVIALTDPEGCPLSRFKDSLGNPTHILRIGESYKEKQRTIQAKKEVEQRRAGGYSRKYASKAKNLADDMVRNTARDLLYYAVTQDAMLIFENLSRGFGRQGKRTFMAERQYTRMEDWLTAKLAYEGLPSKTYLSKTLAQYTSKTCSNCGFTITSADYDRVLEKLKKTATGWMTTINGKELKVEGQITYYNRYKRQNVVKDLSVELDRLSEESVNNDISSWTKGRSGEALSLLKKRFSHRPVQEKFVCLNCGFETHADEQAALNIARSWLFLRSQEYKKYQTNKTTGNTDKRAFVETWQSFYRKKLKEVWKPAV

SEQ ID NO: 40092 - protein, 978 aa, Artificial Sequence
  CasX variant
QEIKRINKIRRRLVKDSNTKKAGKTGPMKTLLVRVMTPDLRERLENLRKKPENIPQPISNTSRANLNKLLTDYTEMKKAILHVYWEEFQKDPVGLMSRVAQPASKKIDQNKLKPEMDEKGNLTTAGFACSQCGQPLFVYKLEQVSEKGKAYTNYFGRCNVAEHEKLILLAQLKPEKDSDEAVTYSLGKFGQRALDFYSIHVTKESTHPVKPLAQIAGNRYASGPVGKALSDACMGTIASFLSKYQDIIIEHQKVVKGNQKRLESLRELAGKENLEYPSVTLPPQPHTKEGVDAYNEVIARVRMWVNLNLWQKLKLSRDDAKPLLRLKGFPSFPLVPRQANEVDWWDMVCNVKKLINEKKEDGKVFWQNLAGYKRQEALRPYLSSEEDRKKGKKFARYQLGDLLLHLEKKHGEDWGKVYDEAWERIDKKVEGLSKHIKLEEERRSEDAQSKAALTDWLRAKASFVIEGLKEADKDEFCRCELKLQKWYGDLRGKPFAIEAENSILDISGFSKQYNCAFIWQKDGVKKLNLYLIINYFKGGKLRFKKIKPEAFEANRFYTVINKKSGEIVPMEVNFNFDDPNLIILPLAFGKRQGREFIWNDLLSLETGSLKLANGRVIEKTLYNRRTRQDEPALFVALTFERREVLDSSNIKPMNLIGVDRGENIPAVIALTDPEGCPLSRFKDSLGNPTHILRIGESYKEKQRTIQAKKEVEQRRAGGYSRKYASKAKNLADDMVRNTARDLLYYAVTQDAMLIFENLSRGFGRQGKRTFMAERQYTRMEDWLTAKLAYEGLPSKTYLSKTLAQYTSKTCSNCGFTITSADYDRVLEKLKKTATGWMTTINGKELKVEGQITYYNRYKRQNVVKDLSVELDRLSEESVNNDISSWTKGRSGEALSLLKKRFSHRPVQEKFVCLNCGFETHADEQAALNIARSWLFLRSQEYKKYQTNKTTGNTDKRAFVETWQSFYRKKLKEVWKPAV

SEQ ID NO: 40093 - protein, 977 aa, Artificial Sequence
  CasX variant
QEIKRINKIRRRLVKDSNTKKAGKTGPMKTLLVRVMTPDLRERLENLRKKPENIPQPISNTSRANLNKLLTDYTEMKKAILHVYWEEFQKDPVGLMSRVAQPASKKIDQNKLKPEMDEKGNLTTAGFACSQCGQPLFVYKLEQVSEKGKAYTNYFGRCNVAEHEKLILLAQLKPEKDSDEAVTYSLGKFGQRALDFYSIHVTKESTHPVKPLAQIAGNRYASGPVGKALSDACMGTIASFLSKYQDIIIEHQKVVKGNQKRLESLRELAGKENLEYPSVTLPPQPHTKEGVDAYNEVIARVRMWVNLNLWQKLKLSRDDAKPLLRLKGFPSFPLVRQANEVDWWDMVCNVKKLINEKKEDGKVFWQNLAGYKRQEALRPYLSSEEDRKKGKKFARYQLGDLLLHLEKKHGEDWGKVYDEAWERIDKKVEGLSKHIKLEEERRSEDAQSKAALTDWLRAKASFVIEGLKEADKDEFCRCELKLQKWYGDLRGKPFAIEAENSILDISGFSKQYNCAFIWQKDGVKKLNLYLIINYFKGGKLRFKKIKPEAFEANRFYTVINKKSGEIVPMEVNFNFDDPNLIILPLAFGKRQGREFIWNDLLSLETGSLKLANGRVIEKTLYNRRTRQDEPALFVALTFERREVLDSSNIKPMNLIGVDRGENIPAVIALTDPEGCPLSRFKDSLGNPTHILRIGESYKEKQRTIQAKKEVEQRRAGGYSRKYASKAKNLADDMVRNTARDLLYYAVTQDAMLIFENLSRGFGRQGKRTFMAERQYTRMEDWLTAKLAYEGLPSKTYLSKTLAQYTSKTCSNCGFTITSADYDRVLEKLKKTATGWMTTINGKELKVEGQITYYNRYKRQNVVKDLSVELDRLSEESVNNDISSWTKGRSGEALSLLKKRFSHRPVQEKFVCLNCGFETHADEQAALNIARSWLFLRSQEYKKYQTNKTTGNTDKRAFVETWQSFYRKKLKEVWKPAV

SEQ ID NO: 40094 - protein, 978 aa, Artificial Sequence
  CasX variant
QEIKRINKIRRRLVKDSNTKKAGKTGPMKTLLVRVMTPDLRERLENLRKKPENIPQPISNTSRANLNKLLTDYTEMKKAILHVYWEEFQKDPVGLMSRVAQPASKKIDQNKLKPEMDEKGNLTTAGFACSQCGQPLFVYKLEQVSEKGKAYTNYFGRCNVAEHEKLILLAQLKPEKDSDEAVTYSLGKFGQRALDFYSIHVTKESTHPVKPLAQIAGNRYASGPVGKALSDACMGTIASFLSKYQDIIIEHQKVVKGNQKRLESLRELAGKENLEYPSVTLPPQPHTKEGVDAYNEVIARVRMWVNLNLWQKLKLSRDDAKPLLRLKGFPSFPLVLRQANEVDWWDMVCNVKKLINEKKEDGKVFWQNLAGYKRQEALRPYLSSEEDRKKGKKFARYQLGDLLLHLEKKHGEDWGKVYDEAWERIDKKVEGLSKHIKLEEERRSEDAQSKAALTDWLRAKASFVIEGLKEADKDEFCRCELKLQKWYGDLRGKPFAIEAENSILDISGFSKQYNCAFIWQKDGVKKLNLYLIINYFKGGKLRFKKIKPEAFEANRFYTVINKKSGEIVPMEVNFNFDDPNLIILPLAFGKRQGREFIWNDLLSLETGSLKLANGRVIEKTLYNRRTRQDEPALFVALTFERREVLDSSNIKPMNLIGVDRGENIPAVIALTDPEGCPLSRFKDSLGNPTHILRIGESYKEKQRTIQAKKEVEQRRAGGYSRKYASKAKNLADDMVRNTARDLLYYAVTQDAMLIFENLSRGFGRQGKRTFMAERQYTRMEDWLTAKLAYEGLPSKTYLSKTLAQYTSKTCSNCGFTITSADYDRVLEKLKKTATGWMTTINGKELKVEGQITYYNRYKRQNVVKDLSVELDRLSEESVNNDISSWTKGRSGEALSLLKKRFSHRPVQEKFVCLNCGFETHADEQAALNIARSWLFLRSQEYKKYQTNKTTGNTDKRAFVETWQSFYRKKLKEVWKPAV

SEQ ID NO: 40095 - protein, 978 aa, Artificial Sequence
  CasX variant
QEIKRINKIRRRLVKDSNTKKAGKTGPMKTLLVRVMTPDLRERLENLRKKPENIPQPISNTSRANLNKLLTDYTEMKKAILHVYWEEFQKDPVGLMSRVAQPASKKIDQNKLKPEMDEKGNLTTAGFACSQCGQPLFVYKLEQVSEKGKAYTNYFGRCNVAEHEKLILLAQLKPEKDSDEAVTYSLGKFGQRALDFYSIHVTKESTHPVKPLAQIAGNRYASGPVGKALSDACMGTIASFLSKYQDIIIEHQKVVKGNQKRLESLRELAGKENLEYPSVTLPPQPHTKEGVDAYNEVIARVRMWVNLNLWQKLKLSRDDAKPLLRLKGFPSFPLVRRQANEVDWWDMVCNVKKLINEKKEDGKVFWQNLAGYKRQEALRPYLSSEEDRKKGKKFARYQLGDLLLHLEKKHGEDWGKVYDEAWERIDKKVEGLSKHIKLEEERRSEDAQSKAALTDWLRAKASFVIEGLKEADKDEFCRCELKLQKWYGDLRGKPFAIEAENSILDISGFSKQYNCAFIWQKDGVKKLNLYLIINYFKGGKLRFKKIKPEAFEANRFYTVINKKSGEIVPMEVNFNFDDPNLIILPLAFGKRQGREFIWNDLLSLETGSLKLANGRVIEKTLYNRRTRQDEPALFVALTFERREVLDSSNIKPMNLIGVDRGENIPAVIALTDPEGCPLSRFKDSLGNPTHILRIGESYKEKQRTIQAKKEVEQRRAGGYSRKYASKAKNLADDMVRNTARDLLYYAVTQDAMLIFENLSRGFGRQGKRTFMAERQYTRMEDWLTAKLAYEGLPSKTYLSKTLAQYTSKTCSNCGFTITSADYDRVLEKLKKTATGWMTTINGKELKVEGQITYYNRYKRQNVVKDLSVELDRLSEESVNNDISSWTKGRSGEALSLLKKRFSHRPVQEKFVCLNCGFETHADEQAALNIARSWLFLRSQEYKKYQTNKTTGNTDKRAFVETWQSFYRKKLKEVWKPAV

SEQ ID NO: 40096 - protein, 979 aa, Artificial Sequence
  CasX variant
QEIKRINKIRRRLVKDSNTKKAGKTGPMKTLLVRVMTPDLRERLENLRKKPENIPQPISNTSRANLNKLLTDYTEMKKAILHVYWEEFQKDPVGLMSRVAQPASKKIDQNKLKPEMDEKGNLTTAGFACSQCGQPLFVYKLEQVSEKGKAYTNYFGRCNVAEHEKLILLAQLKPEKDSDEAVTYSLGKFGQRALDFYSIHVTKESTHPVKPLAQIAGNRYASGPVGKALSDACMGTIASFLSKYQDIIIEHQKVVKGNQKRLESLRELAGKENLEYPSVTLPPQPHTKEGVDAYNEVIARVRMWVNLNLWQKLKLSRDDAKPLLRLKGFPSFPLVERQQANEVDWWDMVCNVKKLINEKKEDGKVFWQNLAGYKRQEALRPYLSSEEDRKKGKKFARYQLGDLLLHLEKKHGEDWGKVYDEAWERIDKKVEGLSKHIKLEEERRSEDAQSKAALTDWLRAKASFVIEGLKEADKDEFCRCELKLQKWYGDLRGKPFAIEAENSILDISGFSKQYNCAFIWQKDGVKKLNLYLIINYFKGGKLRFKKIKPEAFEANRFYTVINKKSGEIVPMEVNFNFDDPNLIILPLAFGKRQGREFIWNDLLSLETGSLKLANGRVIEKTLYNRRTRQDEPALFVALTFERREVLDSSNIKPMNLIGVDRGENIPAVIALTDPEGCPLSRFKDSLGNPTHILRIGESYKEKQRTIQAKKEVEQRRAGGYSRKYASKAKNLADDMVRNTARDLLYYAVTQDAMLIFENLSRGFGRQGKRTFMAERQYTRMEDWLTAKLAYEGLPSKTYLSKTLAQYTSKTCSNCGFTITSADYDRVLEKLKKTATGWMTTINGKELKVEGQITYYNRYKRQNVVKDLSVELDRLSEESVNNDISSWTKGRSGEALSLLKKRFSHRPVQEKFVCLNCGFETHADEQAALNIARSWLFLRSQEYKKYQTNKTTGNTDKRAFVETWQSFYRKKLKEVWKPAV

SEQ ID NO: 40097 - protein, 979 aa, Artificial Sequence
  CasX variant
QEIKRINKIRRRLVKDSNTKKAGKTGPMKTLLVRVMTPDLRERLENLRKKPENIPQPISNTSRANLNKLLTDYTEMKKAILHVYWEEFQKDPVGLMSRVAQPASKKIDQNKLKPEMDEKGNLTTAGFACSQCGQPLFVYKLEQVSEKGKAYTNYFGRCNVAEHEKLILLAQLKPEKDSDEAVTYSLGKFGQRALDFYSIHVTKESTHPVKPLAQIAGNRYASGPVGKALSDACMGTIASFLSKYQDIIIEHQKVVKGNQKRLESLRELAGKENLEYPSVTLPPQPHTKEGVDAYNEVIARVRMWVNLNLWQKLKLSRDDAKPLLRLKGFPSFPLVERQANHEVDWWDMVCNVKKLINEKKEDGKVFWQNLAGYKRQEALRPYLSSEEDRKKGKKFARYQLGDLLLHLEKKHGEDWGKVYDEAWERIDKKVEGLSKHIKLEEERRSEDAQSKAALTDWLRAKASFVIEGLKEADKDEFCRCELKLQKWYGDLRGKPFAIEAENSILDISGFSKQYNCAFIWQKDGVKKLNLYLIINYFKGGKLRFKKIKPEAFEANRFYTVINKKSGEIVPMEVNFNFDDPNLIILPLAFGKRQGREFIWNDLLSLETGSLKLANGRVIEKTLYNRRTRQDEPALFVALTFERREVLDSSNIKPMNLIGVDRGENIPAVIALTDPEGCPLSRFKDSLGNPTHILRIGESYKEKQRTIQAKKEVEQRRAGGYSRKYASKAKNLADDMVRNTARDLLYYAVTQDAMLIFENLSRGFGRQGKRTFMAERQYTRMEDWLTAKLAYEGLPSKTYLSKTLAQYTSKTCSNCGFTITSADYDRVLEKLKKTATGWMTTINGKELKVEGQITYYNRYKRQNVVKDLSVELDRLSEESVNNDISSWTKGRSGEALSLLKKRFSHRPVQEKFVCLNCGFETHADEQAALNIARSWLFLRSQEYKKYQTNKTTGNTDKRAFVETWQSFYRKKLKEVWKPAV

SEQ ID NO: 40098 - protein, 979 aa, Artificial Sequence
  CasX variant
QEIKRINKIRRRLVKDSNTKKAGKTGPMKTLLVRVMTPDLRERLENLRKKPENIPQPISNTSRANLNKLLTDYTEMKKAILHVYWEEFQKDPVGLMSRVAQPASKKIDQNKLKPEMDEKGNLTTAGFACSQCGQPLFVYKLEQVSEKGKAYTNYFGRCNVAEHEKLILLAQLKPEKDSDEAVTYSLGKFGQRALDFYSIHVTKESTHPVKPLAQIAGNRYASGPVGKALSDACMGTIASFLSKYQDIIIEHQKVVKGNQKRLESLRELAGKENLEYPSVTLPPQPHTKEGVDAYNEVIARVRMWVNLNLWQKLKLSRDDAKPLLRLKGFPSFPLVERQANAEVDWWDMVCNVKKLINEKKEDGKVFWQNLAGYKRQEALRPYLSSEEDRKKGKKFARYQLGDLLLHLEKKHGEDWGKVYDEAWERIDKKVEGLSKHIKLEEERRSEDAQSKAALTDWLRAKASFVIEGLKEADKDEFCRCELKLQKWYGDLRGKPFAIEAENSILDISGFSKQYNCAFIWQKDGVKKLNLYLIINYFKGGKLRFKKIKPEAFEANRFYTVINKKSGEIVPMEVNFNFDDPNLIILPLAFGKRQGREFIWNDLLSLETGSLKLANGRVIEKTLYNRRTRQDEPALFVALTFERREVLDSSNIKPMNLIGVDRGENIPAVIALTDPEGCPLSRFKDSLGNPTHILRIGESYKEKQRTIQAKKEVEQRRAGGYSRKYASKAKNLADDMVRNTARDLLYYAVTQDAMLIFENLSRGFGRQGKRTFMAERQYTRMEDWLTAKLAYEGLPSKTYLSKTLAQYTSKTCSNCGFTITSADYDRVLEKLKKTATGWMTTINGKELKVEGQITYYNRYKRQNVVKDLSVELDRLSEESVNNDISSWTKGRSGEALSLLKKRFSHRPVQEKFVCLNCGFETHADEQAALNIARSWLFLRSQEYKKYQTNKTTGNTDKRAFVETWQSFYRKKLKEVWKPAV

SEQ ID NO: 40099 - protein, 979 aa, Artificial Sequence
  CasX variant
QEIKRINKIRRRLVKDSNTKKAGKTGPMKTLLVRVMTPDLRERLENLRKKPENIPQPISNTSRANLNKLLTDYTEMKKAILHVYWEEFQKDPVGLMSRVAQPASKKIDQNKLKPEMDEKGNLTTAGFACSQCGQPLFVYKLEQVSEKGKAYTNYFGRCNVAEHEKLILLAQLKPEKDSDEAVTYSLGKFGQRALDFYSIHVTKESTHPVKPLAQIAGNRYASGPVGKALSDACMGTIASFLSKYQDIIIEHQKVVKGNQKRLESLRELAGKENLEYPSVTLPPQPHTKEGVDAYNEVIARVRMWVNLNLWQKLKLSRDDAKPLLRLKGFPSFPLVERQANEVDDWWDMVCNVKKLINEKKEDGKVFWQNLAGYKRQEALRPYLSSEEDRKKGKKFARYQLGDLLLHLEKKHGEDWGKVYDEAWERIDKKVEGLSKHIKLEEERRSEDAQSKAALTDWLRAKASFVIEGLKEADKDEFCRCELKLQKWYGDLRGKPFAIEAENSILDISGFSKQYNCAFIWQKDGVKKLNLYLIINYFKGGKLRFKKIKPEAFEANRFYTVINKKSGEIVPMEVNFNFDDPNLIILPLAFGKRQGREFIWNDLLSLETGSLKLANGRVIEKTLYNRRTRQDEPALFVALTFERREVLDSSNIKPMNLIGVDRGENIPAVIALTDPEGCPLSRFKDSLGNPTHILRIGESYKEKQRTIQAKKEVEQRRAGGYSRKYASKAKNLADDMVRNTARDLLYYAVTQDAMLIFENLSRGFGRQGKRTFMAERQYTRMEDWLTAKLAYEGLPSKTYLSKTLAQYTSKTCSNCGFTITSADYDRVLEKLKKTATGWMTTINGKELKVEGQITYYNRYKRQNVVKDLSVELDRLSEESVNNDISSWTKGRSGEALSLLKKRFSHRPVQEKFVCLNCGFETHADEQAALNIARSWLFLRSQEYKKYQTNKTTGNTDKRAFVETWQSFYRKKLKEVWKPAV

SEQ ID NO: 40100 - protein, 979 aa, Artificial Sequence
  CasX variant
QEIKRINKIRRRLVKDSNTKKAGKTGPMKTLLVRVMTPDLRERLENLRKKPENIPQPISNTSRANLNKLLTDYTEMKKAILHVYWEEFQKDPVGLMSRVAQPASKKIDQNKLKPEMDEKGNLTTAGFACSQCGQPLFVYKLEQVSEKGKAYTNYFGRCNVAEHEKLILLAQLKPEKDSDEAVTYSLGKFGQRALDFYSIHVTKESTHPVKPLAQIAGNRYASGPVGKALSDACMGTIASFLSKYQDIIIEHQKVVKGNQKRLESLRELAGKENLEYPSVTLPPQPHTKEGVDAYNEVIARVRMWVNLNLWQKLKLSRDDAKPLLRLKGFPSFPLVERQANEVDWWPDMVCNVKKLINEKKEDGKVFWQNLAGYKRQEALRPYLSSEEDRKKGKKFARYQLGDLLLHLEKKHGEDWGKVYDEAWERIDKKVEGLSKHIKLEEERRSEDAQSKAALTDWLRAKASFVIEGLKEADKDEFCRCELKLQKWYGDLRGKPFAIEAENSILDISGFSKQYNCAFIWQKDGVKKLNLYLIINYFKGGKLRFKKIKPEAFEANRFYTVINKKSGEIVPMEVNFNFDDPNLIILPLAFGKRQGREFIWNDLLSLETGSLKLANGRVIEKTLYNRRTRQDEPALFVALTFERREVLDSSNIKPMNLIGVDRGENIPAVIALTDPEGCPLSRFKDSLGNPTHILRIGESYKEKQRTIQAKKEVEQRRAGGYSRKYASKAKNLADDMVRNTARDLLYYAVTQDAMLIFENLSRGFGRQGKRTFMAERQYTRMEDWLTAKLAYEGLPSKTYLSKTLAQYTSKTCSNCGFTITSADYDRVLEKLKKTATGWMTTINGKELKVEGQITYYNRYKRQNVVKDLSVELDRLSEESVNNDISSWTKGRSGEALSLLKKRFSHRPVQEKFVCLNCGFETHADEQAALNIARSWLFLRSQEYKKYQTNKTTGNTDKRAFVETWQSFYRKKLKEVWKPAV

SEQ ID NO: 40101 - protein, 978 aa, Artificial Sequence
  CasX variant
QEIKRINKIRRRLVKDSNTKKAGKTGPMKTLLVRVMTPDLRERLENLRKKPENIPQPISNTSRANLNKLLTDYTEMKKAILHVYWEEFQKDPVGLMSRVAQPASKKIDQNKLKPEMDEKGNLTTAGFACSQCGQPLFVYKLEQVSEKGKAYTNYFGRCNVAEHEKLILLAQLKPEKDSDEAVTYSLGKFGQRALDFYSIHVTKESTHPVKPLAQIAGNRYASGPVGKALSDACMGTIASFLSKYQDIIIEHQKVVKGNQKRLESLRELAGKENLEYPSVTLPPQPHTKEGVDAYNEVIARVRMWVNLNLWQKLKLSRDDAKPLLRLKGFPSFPLVERQANEVDWWDMVCNVKKLINEKKEDGKVFWQNLAGYKRQEALRPYLSSEEDRKKGKKFARTQLGDLLLHLEKKHGEDWGKVYDEAWERIDKKVEGLSKHIKLEEERRSEDAQSKAALTDWLRAKASFVIEGLKEADKDEFCRCELKLQKWYGDLRGKPFAIEAENSILDISGFSKQYNCAFIWQKDGVKKLNLYLIINYFKGGKLRFKKIKPEAFEANRFYTVINKKSGEIVPMEVNFNFDDPNLIILPLAFGKRQGREFIWNDLLSLETGSLKLANGRVIEKTLYNRRTRQDEPALFVALTFERREVLDSSNIKPMNLIGVDRGENIPAVIALTDPEGCPLSRFKDSLGNPTHILRIGESYKEKQRTIQAKKEVEQRRAGGYSRKYASKAKNLADDMVRNTARDLLYYAVTQDAMLIFENLSRGFGRQGKRTFMAERQYTRMEDWLTAKLAYEGLPSKTYLSKTLAQYTSKTCSNCGFTITSADYDRVLEKLKKTATGWMTTINGKELKVEGQITYYNRYKRQNVVKDLSVELDRLSEESVNNDISSWTKGRSGEALSLLKKRFSHRPVQEKFVCLNCGFETHADEQAALNIARSWLFLRSQEYKKYQTNKTTGNTDKRAFVETWQSFYRKKLKEVWKPAV

SEQ ID NO: 40102 - protein, 978 aa, Artificial Sequence
  CasX variant
QEIKRINKIRRRLVKDSNTKKAGKTGPMKTLLVRVMTPDLRERLENLRKKPENIPQPISNTSRANLNKLLTDYTEMKKAILHVYWEEFQKDPVGLMSRVAQPASKKIDQNKLKPEMDEKGNLTTAGFACSQCGQPLFVYKLEQVSEKGKAYTNYFGRCNVAEHEKLILLAQLKPEKDSDEAVTYSLGKFGQRALDFYSIHVTKESTHPVKPLAQIAGNRYASGPVGKALSDACMGTIASFLSKYQDIIIEHQKVVKGNQKRLESLRELAGKENLEYPSVTLPPQPHTKEGVDAYNEVIARVRMWVNLNLWQKLKLSRDDAKPLLRLKGFPSFPLVERQANEVDWWDMVCNVKKLINEKKEDGKVFWQNLAGYKRQEALRPYLSSEEDRKKGKKFARYQLMDLLLHLEKKHGEDWGKVYDEAWERIDKKVEGLSKHIKLEEERRSEDAQSKAALTDWLRAKASFVIEGLKEADKDEFCRCELKLQKWYGDLRGKPFAIEAENSILDISGFSKQYNCAFIWQKDGVKKLNLYLIINYFKGGKLRFKKIKPEAFEANRFYTVINKKSGEIVPMEVNFNFDDPNLIILPLAFGKRQGREFIWNDLLSLETGSLKLANGRVIEKTLYNRRTRQDEPALFVALTFERREVLDSSNIKPMNLIGVDRGENIPAVIALTDPEGCPLSRFKDSLGNPTHILRIGESYKEKQRTIQAKKEVEQRRAGGYSRKYASKAKNLADDMVRNTARDLLYYAVTQDAMLIFENLSRGFGRQGKRTFMAERQYTRMEDWLTAKLAYEGLPSKTYLSKTLAQYTSKTCSNCGFTITSADYDRVLEKLKKTATGWMTTINGKELKVEGQITYYNRYKRQNVVKDLSVELDRLSEESVNNDISSWTKGRSGEALSLLKKRFSHRPVQEKFVCLNCGFETHADEQAALNIARSWLFLRSQEYKKYQTNKTTGNTDKRAFVETWQSFYRKKLKEVWKPAV

SEQ ID NO: 40103 - protein, 978 aa, Artificial Sequence
  CasX variant
QEIKRINKIRRRLVKDSNTKKAGKTGPMKTLLVRVMTPDLRERLENLRKKPENIPQPISNTSRANLNKLLTDYTEMKKAILHVYWEEFQKDPVGLMSRVAQPASKKIDQNKLKPEMDEKGNLTTAGFACSQCGQPLFVYKLEQVSEKGKAYTNYFGRCNVAEHEKLILLAQLKPEKDSDEAVTYSLGKFGQRALDFYSIHVTKESTHPVKPLAQIAGNRYASGPVGKALSDACMGTIASFLSKYQDIIIEHQKVVKGNQKRLESLRELAGKENLEYPSVTLPPQPHTKEGVDAYNEVIARVRMWVNLNLWQKLKLSRDDAKPLLRLKGFPSFPLVERQANEVDWWDMVCNVKKLINEKKEDGKVFWQNLAGYKRQEALRPYLSSEEDRKKGKKFARYQLGDLLNHLEKKHGEDWGKVYDEAWERIDKKVEGLSKHIKLEEERRSEDAQSKAALTDWLRAKASFVIEGLKEADKDEFCRCELKLQKWYGDLRGKPFAIEAENSILDISGFSKQYNCAFIWQKDGVKKLNLYLIINYFKGGKLRFKKIKPEAFEANRFYTVINKKSGEIVPMEVNFNFDDPNLIILPLAFGKRQGREFIWNDLLSLETGSLKLANGRVIEKTLYNRRTRQDEPALFVALTFERREVLDSSNIKPMNLIGVDRGENIPAVIALTDPEGCPLSRFKDSLGNPTHILRIGESYKEKQRTIQAKKEVEQRRAGGYSRKYASKAKNLADDMVRNTARDLLYYAVTQDAMLIFENLSRGFGRQGKRTFMAERQYTRMEDWLTAKLAYEGLPSKTYLSKTLAQYTSKTCSNCGFTITSADYDRVLEKLKKTATGWMTTINGKELKVEGQITYYNRYKRQNVVKDLSVELDRLSEESVNNDISSWTKGRSGEALSLLKKRFSHRPVQEKFVCLNCGFETHADEQAALNIARSWLFLRSQEYKKYQTNKTTGNTDKRAFVETWQSFYRKKLKEVWKPAV

SEQ ID NO: 40104 - protein, 978 aa, Artificial Sequence
  CasX variant
QEIKRINKIRRRLVKDSNTKKAGKTGPMKTLLVRVMTPDLRERLENLRKKPENIPQPISNTSRANLNKLLTDYTEMKKAILHVYWEEFQKDPVGLMSRVAQPASKKIDQNKLKPEMDEKGNLTTAGFACSQCGQPLFVYKLEQVSEKGKAYTNYFGRCNVAEHEKLILLAQLKPEKDSDEAVTYSLGKFGQRALDFYSIHVTKESTHPVKPLAQIAGNRYASGPVGKALSDACMGTIASFLSKYQDIIIEHQKVVKGNQKRLESLRELAGKENLEYPSVTLPPQPHTKEGVDAYNEVIARVRMWVNLNLWQKLKLSRDDAKPLLRLKGFPSFPLVERQANEVDWWDMVCNVKKLINEKKEDGKVFWQNLAGYKRQEALRPYLSSEEDRKKGKKFARYQLGDLLWHLEKKHGEDWGKVYDEAWERIDKKVEGLSKHIKLEEERRSEDAQSKAALTDWLRAKASFVIEGLKEADKDEFCRCELKLQKWYGDLRGKPFAIEAENSILDISGFSKQYNCAFIWQKDGVKKLNLYLIINYFKGGKLRFKKIKPEAFEANRFYTVINKKSGEIVPMEVNFNFDDPNLIILPLAFGKRQGREFIWNDLLSLETGSLKLANGRVIEKTLYNRRTRQDEPALFVALTFERREVLDSSNIKPMNLIGVDRGENIPAVIALTDPEGCPLSRFKDSLGNPTHILRIGESYKEKQRTIQAKKEVEQRRAGGYSRKYASKAKNLADDMVRNTARDLLYYAVTQDAMLIFENLSRGFGRQGKRTFMAERQYTRMEDWLTAKLAYEGLPSKTYLSKTLAQYTSKTCSNCGFTITSADYDRVLEKLKKTATGWMTTINGKELKVEGQITYYNRYKRQNVVKDLSVELDRLSEESVNNDISSWTKGRSGEALSLLKKRFSHRPVQEKFVCLNCGFETHADEQAALNIARSWLFLRSQEYKKYQTNKTTGNTDKRAFVETWQSFYRKKLKEVWKPAV

SEQ ID NO: 40105 - protein, 978 aa, Artificial Sequence
  CasX variant
QEIKRINKIRRRLVKDSNTKKAGKTGPMKTLLVRVMTPDLRERLENLRKKPENIPQPISNTSRANLNKLLTDYTEMKKAILHVYWEEFQKDPVGLMSRVAQPASKKIDQNKLKPEMDEKGNLTTAGFACSQCGQPLFVYKLEQVSEKGKAYTNYFGRCNVAEHEKLILLAQLKPEKDSDEAVTYSLGKFGQRALDFYSIHVTKESTHPVKPLAQIAGNRYASGPVGKALSDACMGTIASFLSKYQDIIIEHQKVVKGNQKRLESLRELAGKENLEYPSVTLPPQPHTKEGVDAYNEVIARVRMWVNLNLWQKLKLSRDDAKPLLRLKGFPSFPLVERQANEVDWWDMVCNVKKLINEKKEDGKVFWQNLAGYKRQEALRPYLSSEEDRKKGKKFARYQLGDLLLHLYKKHGEDWGKVYDEAWERIDKKVEGLSKHIKLEEERRSEDAQSKAALTDWLRAKASFVIEGLKEADKDEFCRCELKLQKWYGDLRGKPFAIEAENSILDISGFSKQYNCAFIWQKDGVKKLNLYLIINYFKGGKLRFKKIKPEAFEANRFYTVINKKSGEIVPMEVNFNFDDPNLIILPLAFGKRQGREFIWNDLLSLETGSLKLANGRVIEKTLYNRRTRQDEPALFVALTFERREVLDSSNIKPMNLIGVDRGENIPAVIALTDPEGCPLSRFKDSLGNPTHILRIGESYKEKQRTIQAKKEVEQRRAGGYSRKYASKAKNLADDMVRNTARDLLYYAVTQDAMLIFENLSRGFGRQGKRTFMAERQYTRMEDWLTAKLAYEGLPSKTYLSKTLAQYTSKTCSNCGFTITSADYDRVLEKLKKTATGWMTTINGKELKVEGQITYYNRYKRQNVVKDLSVELDRLSEESVNNDISSWTKGRSGEALSLLKKRFSHRPVQEKFVCLNCGFETHADEQAALNIARSWLFLRSQEYKKYQTNKTTGNTDKRAFVETWQSFYRKKLKEVWKPAV

SEQ ID NO: 40106 - protein, 978 aa, Artificial Sequence
  CasX variant
QEIKRINKIRRRLVKDSNTKKAGKTGPMKTLLVRVMTPDLRERLENLRKKPENIPQPISNTSRANLNKLLTDYTEMKKAILHVYWEEFQKDPVGLMSRVAQPASKKIDQNKLKPEMDEKGNLTTAGFACSQCGQPLFVYKLEQVSEKGKAYTNYFGRCNVAEHEKLILLAQLKPEKDSDEAVTYSLGKFGQRALDFYSIHVTKESTHPVKPLAQIAGNRYASGPVGKALSDACMGTIASFLSKYQDIIIEHQKVVKGNQKRLESLRELAGKENLEYPSVTLPPQPHTKEGVDAYNEVIARVRMWVNLNLWQKLKLSRDDAKPLLRLKGFPSFPLVERQANEVDWWDMVCNVKKLINEKKEDGKVFWQNLAGYKRQEALRPYLSSEEDRKKGKKFARYQLGDLLLHLEKKHPEDWGKVYDEAWERIDKKVEGLSKHIKLEEERRSEDAQSKAALTDWLRAKASFVIEGLKEADKDEFCRCELKLQKWYGDLRGKPFAIEAENSILDISGFSKQYNCAFIWQKDGVKKLNLYLIINYFKGGKLRFKKIKPEAFEANRFYTVINKKSGEIVPMEVNFNFDDPNLIILPLAFGKRQGREFIWNDLLSLETGSLKLANGRVIEKTLYNRRTRQDEPALFVALTFERREVLDSSNIKPMNLIGVDRGENIPAVIALTDPEGCPLSRFKDSLGNPTHILRIGESYKEKQRTIQAKKEVEQRRAGGYSRKYASKAKNLADDMVRNTARDLLYYAVTQDAMLIFENLSRGFGRQGKRTFMAERQYTRMEDWLTAKLAYEGLPSKTYLSKTLAQYTSKTCSNCGFTITSADYDRVLEKLKKTATGWMTTINGKELKVEGQITYYNRYKRQNVVKDLSVELDRLSEESVNNDISSWTKGRSGEALSLLKKRFSHRPVQEKFVCLNCGFETHADEQAALNIARSWLFLRSQEYKKYQTNKTTGNTDKRAFVETWQSFYRKKLKEVWKPAV

SEQ ID NO: 40107 - protein, 979 aa, Artificial Sequence
  CasX variant
QEIKRINKIRRRLVKDSNTKKAGKTGPMKTLLVRVMTPDLRERLENLRKKPENIPQPISNTSRANLNKLLTDYTEMKKAILHVYWEEFQKDPVGLMSRVAQPASKKIDQNKLKPEMDEKGNLTTAGFACSQCGQPLFVYKLEQVSEKGKAYTNYFGRCNVAEHEKLILLAQLKPEKDSDEAVTYSLGKFGQRALDFYSIHVTKESTHPVKPLAQIAGNRYASGPVGKALSDACMGTIASFLSKYQDIIIEHQKVVKGNQKRLESLRELAGKENLEYPSVTLPPQPHTKEGVDAYNEVIARVRMWVNLNLWQKLKLSRDDAKPLLRLKGFPSFPLVERQANEVDWWDMVCNVKKLINEKKEDGKVFWQNLAGYKRQEALRPYLSSEEDRKKGKKFARYQLGDLLLHLEKKHEGEDWGKVYDEAWERIDKKVEGLSKHIKLEEERRSEDAQSKAALTDWLRAKASFVIEGLKEADKDEFCRCELKLQKWYGDLRGKPFAIEAENSILDISGFSKQYNCAFIWQKDGVKKLNLYLIINYFKGGKLRFKKIKPEAFEANRFYTVINKKSGEIVPMEVNFNFDDPNLIILPLAFGKRQGREFIWNDLLSLETGSLKLANGRVIEKTLYNRRTRQDEPALFVALTFERREVLDSSNIKPMNLIGVDRGENIPAVIALTDPEGCPLSRFKDSLGNPTHILRIGESYKEKQRTIQAKKEVEQRRAGGYSRKYASKAKNLADDMVRNTARDLLYYAVTQDAMLIFENLSRGFGRQGKRTFMAERQYTRMEDWLTAKLAYEGLPSKTYLSKTLAQYTSKTCSNCGFTITSADYDRVLEKLKKTATGWMTTINGKELKVEGQITYYNRYKRQNVVKDLSVELDRLSEESVNNDISSWTKGRSGEALSLLKKRFSHRPVQEKFVCLNCGFETHADEQAALNIARSWLFLRSQEYKKYQTNKTTGNTDKRAFVETWQSFYRKKLKEVWKPAV

SEQ ID NO: 40108 - protein, 979 aa, Artificial Sequence
  CasX variant
QEIKRINKIRRRLVKDSNTKKAGKTGPMKTLLVRVMTPDLRERLENLRKKPENIPQPISNTSRANLNKLLTDYTEMKKAILHVYWEEFQKDPVGLMSRVAQPASKKIDQNKLKPEMDEKGNLTTAGFACSQCGQPLFVYKLEQVSEKGKAYTNYFGRCNVAEHEKLILLAQLKPEKDSDEAVTYSLGKFGQRALDFYSIHVTKESTHPVKPLAQIAGNRYASGPVGKALSDACMGTIASFLSKYQDIIIEHQKVVKGNQKRLESLRELAGKENLEYPSVTLPPQPHTKEGVDAYNEVIARVRMWVNLNLWQKLKLSRDDAKPLLRLKGFPSFPLVERQANEVDWWDMVCNVKKLINEKKEDGKVFWQNLAGYKRQEALRPYLSSEEDRKKGKKFARYQLGDLLLHLEKKHGERDWGKVYDEAWERIDKKVEGLSKHIKLEEERRSEDAQSKAALTDWLRAKASFVIEGLKEADKDEFCRCELKLQKWYGDLRGKPFAIEAENSILDISGFSKQYNCAFIWQKDGVKKLNLYLIINYFKGGKLRFKKIKPEAFEANRFYTVINKKSGEIVPMEVNFNFDDPNLIILPLAFGKRQGREFIWNDLLSLETGSLKLANGRVIEKTLYNRRTRQDEPALFVALTFERREVLDSSNIKPMNLIGVDRGENIPAVIALTDPEGCPLSRFKDSLGNPTHILRIGESYKEKQRTIQAKKEVEQRRAGGYSRKYASKAKNLADDMVRNTARDLLYYAVTQDAMLIFENLSRGFGRQGKRTFMAERQYTRMEDWLTAKLAYEGLPSKTYLSKTLAQYTSKTCSNCGFTITSADYDRVLEKLKKTATGWMTTINGKELKVEGQITYYNRYKRQNVVKDLSVELDRLSEESVNNDISSWTKGRSGEALSLLKKRFSHRPVQEKFVCLNCGFETHADEQAALNIARSWLFLRSQEYKKYQTNKTTGNTDKRAFVETWQSFYRKKLKEVWKPAV

SEQ ID NO: 40109 - protein, 979 aa, Artificial Sequence
  CasX variant
QEIKRINKIRRRLVKDSNTKKAGKTGPMKTLLVRVMTPDLRERLENLRKKPENIPQPISNTSRANLNKLLTDYTEMKKAILHVYWEEFQKDPVGLMSRVAQPASKKIDQNKLKPEMDEKGNLTTAGFACSQCGQPLFVYKLEQVSEKGKAYTNYFGRCNVAEHEKLILLAQLKPEKDSDEAVTYSLGKFGQRALDFYSIHVTKESTHPVKPLAQIAGNRYASGPVGKALSDACMGTIASFLSKYQDIIIEHQKVVKGNQKRLESLRELAGKENLEYPSVTLPPQPHTKEGVDAYNEVIARVRMWVNLNLWQKLKLSRDDAKPLLRLKGFPSFPLVERQANEVDWWDMVCNVKKLINEKKEDGKVFWQNLAGYKRQEALRPYLSSEEDRKKGKKFARYQLGDLLLHLEKKHGEWDWGKVYDEAWERIDKKVEGLSKHIKLEEERRSEDAQSKAALTDWLRAKASFVIEGLKEADKDEFCRCELKLQKWYGDLRGKPFAIEAENSILDISGFSKQYNCAFIWQKDGVKKLNLYLIINYFKGGKLRFKKIKPEAFEANRFYTVINKKSGEIVPMEVNFNFDDPNLIILPLAFGKRQGREFIWNDLLSLETGSLKLANGRVIEKTLYNRRTRQDEPALFVALTFERREVLDSSNIKPMNLIGVDRGENIPAVIALTDPEGCPLSRFKDSLGNPTHILRIGESYKEKQRTIQAKKEVEQRRAGGYSRKYASKAKNLADDMVRNTARDLLYYAVTQDAMLIFENLSRGFGRQGKRTFMAERQYTRMEDWLTAKLAYEGLPSKTYLSKTLAQYTSKTCSNCGFTITSADYDRVLEKLKKTATGWMTTINGKELKVEGQITYYNRYKRQNVVKDLSVELDRLSEESVNNDISSWTKGRSGEALSLLKKRFSHRPVQEKFVCLNCGFETHADEQAALNIARSWLFLRSQEYKKYQTNKTTGNTDKRAFVETWQSFYRKKLKEVWKPAV

SEQ ID NO: 40110 - protein, 979 aa, Artificial Sequence
  CasX variant
QEIKRINKIRRRLVKDSNTKKAGKTGPMKTLLVRVMTPDLRERLENLRKKPENIPQPISNTSRANLNKLLTDYTEMKKAILHVYWEEFQKDPVGLMSRVAQPASKKIDQNKLKPEMDEKGNLTTAGFACSQCGQPLFVYKLEQVSEKGKAYTNYFGRCNVAEHEKLILLAQLKPEKDSDEAVTYSLGKFGQRALDFYSIHVTKESTHPVKPLAQIAGNRYASGPVGKALSDACMGTIASFLSKYQDIIIEHQKVVKGNQKRLESLRELAGKENLEYPSVTLPPQPHTKEGVDAYNEVIARVRMWVNLNLWQKLKLSRDDAKPLLRLKGFPSFPLVERQANEVDWWDMVCNVKKLINEKKEDGKVFWQNLAGYKRQEALRPYLSSEEDRKKGKKFARYQLGDLLLHLEKKHGEYDWGKVYDEAWERIDKKVEGLSKHIKLEEERRSEDAQSKAALTDWLRAKASFVIEGLKEADKDEFCRCELKLQKWYGDLRGKPFAIEAENSILDISGFSKQYNCAFIWQKDGVKKLNLYLIINYFKGGKLRFKKIKPEAFEANRFYTVINKKSGEIVPMEVNFNFDDPNLIILPLAFGKRQGREFIWNDLLSLETGSLKLANGRVIEKTLYNRRTRQDEPALFVALTFERREVLDSSNIKPMNLIGVDRGENIPAVIALTDPEGCPLSRFKDSLGNPTHILRIGESYKEKQRTIQAKKEVEQRRAGGYSRKYASKAKNLADDMVRNTARDLLYYAVTQDAMLIFENLSRGFGRQGKRTFMAERQYTRMEDWLTAKLAYEGLPSKTYLSKTLAQYTSKTCSNCGFTITSADYDRVLEKLKKTATGWMTTINGKELKVEGQITYYNRYKRQNVVKDLSVELDRLSEESVNNDISSWTKGRSGEALSLLKKRFSHRPVQEKFVCLNCGFETHADEQAALNIARSWLFLRSQEYKKYQTNKTTGNTDKRAFVETWQSFYRKKLKEVWKPAV

SEQ ID NO: 40111 - protein, 979 aa, Artificial Sequence
  CasX variant
QEIKRINKIRRRLVKDSNTKKAGKTGPMKTLLVRVMTPDLRERLENLRKKPENIPQPISNTSRANLNKLLTDYTEMKKAILHVYWEEFQKDPVGLMSRVAQPASKKIDQNKLKPEMDEKGNLTTAGFACSQCGQPLFVYKLEQVSEKGKAYTNYFGRCNVAEHEKLILLAQLKPEKDSDEAVTYSLGKFGQRALDFYSIHVTKESTHPVKPLAQIAGNRYASGPVGKALSDACMGTIASFLSKYQDIIIEHQKVVKGNQKRLESLRELAGKENLEYPSVTLPPQPHTKEGVDAYNEVIARVRMWVNLNLWQKLKLSRDDAKPLLRLKGFPSFPLVERQANEVDWWDMVCNVKKLINEKKEDGKVFWQNLAGYKRQEALRPYLSSEEDRKKGKKFARYQLGDLLLHLEKKHGEDYWGKVYDEAWERIDKKVEGLSKHIKLEEERRSEDAQSKAALTDWLRAKASFVIEGLKEADKDEFCRCELKLQKWYGDLRGKPFAIEAENSILDISGFSKQYNCAFIWQKDGVKKLNLYLIINYFKGGKLRFKKIKPEAFEANRFYTVINKKSGEIVPMEVNFNFDDPNLIILPLAFGKRQGREFIWNDLLSLETGSLKLANGRVIEKTLYNRRTRQDEPALFVALTFERREVLDSSNIKPMNLIGVDRGENIPAVIALTDPEGCPLSRFKDSLGNPTHILRIGESYKEKQRTIQAKKEVEQRRAGGYSRKYASKAKNLADDMVRNTARDLLYYAVTQDAMLIFENLSRGFGRQGKRTFMAERQYTRMEDWLTAKLAYEGLPSKTYLSKTLAQYTSKTCSNCGFTITSADYDRVLEKLKKTATGWMTTINGKELKVEGQITYYNRYKRQNVVKDLSVELDRLSEESVNNDISSWTKGRSGEALSLLKKRFSHRPVQEKFVCLNCGFETHADEQAALNIARSWLFLRSQEYKKYQTNKTTGNTDKRAFVETWQSFYRKKLKEVWKPAV

SEQ ID NO: 40112 - protein, 978 aa, Artificial Sequence
  CasX variant
QEIKRINKIRRRLVKDSNTKKAGKTGPMKTLLVRVMTPDLRERLENLRKKPENIPQPISNTSRANLNKLLTDYTEMKKAILHVYWEEFQKDPVGLMSRVAQPASKKIDQNKLKPEMDEKGNLTTAGFACSQCGQPLFVYKLEQVSEKGKAYTNYFGRCNVAEHEKLILLAQLKPEKDSDEAVTYSLGKFGQRALDFYSIHVTKESTHPVKPLAQIAGNRYASGPVGKALSDACMGTIASFLSKYQDIIIEHQKVVKGNQKRLESLRELAGKENLEYPSVTLPPQPHTKEGVDAYNEVIARVRMWVNLNLWQKLKLSRDDAKPLLRLKGFPSFPLVERQANEVDWWDMVCNVKKLINEKKEDGKVFWQNLAGYKRQEALRPYLSSEEDRKKGKKFARYQLGDLLLHLEKKHGEDRGKVYDEAWERIDKKVEGLSKHIKLEEERRSEDAQSKAALTDWLRAKASFVIEGLKEADKDEFCRCELKLQKWYGDLRGKPFAIEAENSILDISGFSKQYNCAFIWQKDGVKKLNLYLIINYFKGGKLRFKKIKPEAFEANRFYTVINKKSGEIVPMEVNFNFDDPNLIILPLAFGKRQGREFIWNDLLSLETGSLKLANGRVIEKTLYNRRTRQDEPALFVALTFERREVLDSSNIKPMNLIGVDRGENIPAVIALTDPEGCPLSRFKDSLGNPTHILRIGESYKEKQRTIQAKKEVEQRRAGGYSRKYASKAKNLADDMVRNTARDLLYYAVTQDAMLIFENLSRGFGRQGKRTFMAERQYTRMEDWLTAKLAYEGLPSKTYLSKTLAQYTSKTCSNCGFTITSADYDRVLEKLKKTATGWMTTINGKELKVEGQITYYNRYKRQNVVKDLSVELDRLSEESVNNDISSWTKGRSGEALSLLKKRFSHRPVQEKFVCLNCGFETHADEQAALNIARSWLFLRSQEYKKYQTNKTTGNTDKRAFVETWQSFYRKKLKEVWKPAV

SEQ ID NO: 40113 - protein, 978 aa, Artificial Sequence
  CasX variant
QEIKRINKIRRRLVKDSNTKKAGKTGPMKTLLVRVMTPDLRERLENLRKKPENIPQPISNTSRANLNKLLTDYTEMKKAILHVYWEEFQKDPVGLMSRVAQPASKKIDQNKLKPEMDEKGNLTTAGFACSQCGQPLFVYKLEQVSEKGKAYTNYFGRCNVAEHEKLILLAQLKPEKDSDEAVTYSLGKFGQRALDFYSIHVTKESTHPVKPLAQIAGNRYASGPVGKALSDACMGTIASFLSKYQDIIIEHQKVVKGNQKRLESLRELAGKENLEYPSVTLPPQPHTKEGVDAYNEVIARVRMWVNLNLWQKLKLSRDDAKPLLRLKGFPSFPLVERQANEVDWWDMVCNVKKLINEKKEDGKVFWQNLAGYKRQEALRPYLSSEEDRKKGKKFARYQLGDLLLHLEKKHGEDWGDVYDEAWERIDKKVEGLSKHIKLEEERRSEDAQSKAALTDWLRAKASFVIEGLKEADKDEFCRCELKLQKWYGDLRGKPFAIEAENSILDISGFSKQYNCAFIWQKDGVKKLNLYLIINYFKGGKLRFKKIKPEAFEANRFYTVINKKSGEIVPMEVNFNFDDPNLIILPLAFGKRQGREFIWNDLLSLETGSLKLANGRVIEKTLYNRRTRQDEPALFVALTFERREVLDSSNIKPMNLIGVDRGENIPAVIALTDPEGCPLSRFKDSLGNPTHILRIGESYKEKQRTIQAKKEVEQRRAGGYSRKYASKAKNLADDMVRNTARDLLYYAVTQDAMLIFENLSRGFGRQGKRTFMAERQYTRMEDWLTAKLAYEGLPSKTYLSKTLAQYTSKTCSNCGFTITSADYDRVLEKLKKTATGWMTTINGKELKVEGQITYYNRYKRQNVVKDLSVELDRLSEESVNNDISSWTKGRSGEALSLLKKRFSHRPVQEKFVCLNCGFETHADEQAALNIARSWLFLRSQEYKKYQTNKTTGNTDKRAFVETWQSFYRKKLKEVWKPAV

SEQ ID NO: 40114 - protein, 978 aa, Artificial Sequence
  CasX variant
QEIKRINKIRRRLVKDSNTKKAGKTGPMKTLLVRVMTPDLRERLENLRKKPENIPQPISNTSRANLNKLLTDYTEMKKAILHVYWEEFQKDPVGLMSRVAQPASKKIDQNKLKPEMDEKGNLTTAGFACSQCGQPLFVYKLEQVSEKGKAYTNYFGRCNVAEHEKLILLAQLKPEKDSDEAVTYSLGKFGQRALDFYSIHVTKESTHPVKPLAQIAGNRYASGPVGKALSDACMGTIASFLSKYQDIIIEHQKVVKGNQKRLESLRELAGKENLEYPSVTLPPQPHTKEGVDAYNEVIARVRMWVNLNLWQKLKLSRDDAKPLLRLKGFPSFPLVERQANEVDWWDMVCNVKKLINEKKEDGKVFWQNLAGYKRQEALRPYLSSEEDRKKGKKFARYQLGDLLLHLEKKHGEDWGPVYDEAWERIDKKVEGLSKHIKLEEERRSEDAQSKAALTDWLRAKASFVIEGLKEADKDEFCRCELKLQKWYGDLRGKPFAIEAENSILDISGFSKQYNCAFIWQKDGVKKLNLYLIINYFKGGKLRFKKIKPEAFEANRFYTVINKKSGEIVPMEVNFNFDDPNLIILPLAFGKRQGREFIWNDLLSLETGSLKLANGRVIEKTLYNRRTRQDEPALFVALTFERREVLDSSNIKPMNLIGVDRGENIPAVIALTDPEGCPLSRFKDSLGNPTHILRIGESYKEKQRTIQAKKEVEQRRAGGYSRKYASKAKNLADDMVRNTARDLLYYAVTQDAMLIFENLSRGFGRQGKRTFMAERQYTRMEDWLTAKLAYEGLPSKTYLSKTLAQYTSKTCSNCGFTITSADYDRVLEKLKKTATGWMTTINGKELKVEGQITYYNRYKRQNVVKDLSVELDRLSEESVNNDISSWTKGRSGEALSLLKKRFSHRPVQEKFVCLNCGFETHADEQAALNIARSWLFLRSQEYKKYQTNKTTGNTDKRAFVETWQSFYRKKLKEVWKPAV

SEQ ID NO: 40115 - protein, 978 aa, Artificial Sequence
  CasX variant
QEIKRINKIRRRLVKDSNTKKAGKTGPMKTLLVRVMTPDLRERLENLRKKPENIPQPISNTSRANLNKLLTDYTEMKKAILHVYWEEFQKDPVGLMSRVAQPASKKIDQNKLKPEMDEKGNLTTAGFACSQCGQPLFVYKLEQVSEKGKAYTNYFGRCNVAEHEKLILLAQLKPEKDSDEAVTYSLGKFGQRALDFYSIHVTKESTHPVKPLAQIAGNRYASGPVGKALSDACMGTIASFLSKYQDIIIEHQKVVKGNQKRLESLRELAGKENLEYPSVTLPPQPHTKEGVDAYNEVIARVRMWVNLNLWQKLKLSRDDAKPLLRLKGFPSFPLVERQANEVDWWDMVCNVKKLINEKKEDGKVFWQNLAGYKRQEALRPYLSSEEDRKKGKKFARYQLGDLLLHLEKKHGEDWGKLYDEAWERIDKKVEGLSKHIKLEEERRSEDAQSKAALTDWLRAKASFVIEGLKEADKDEFCRCELKLQKWYGDLRGKPFAIEAENSILDISGFSKQYNCAFIWQKDGVKKLNLYLIINYFKGGKLRFKKIKPEAFEANRFYTVINKKSGEIVPMEVNFNFDDPNLIILPLAFGKRQGREFIWNDLLSLETGSLKLANGRVIEKTLYNRRTRQDEPALFVALTFERREVLDSSNIKPMNLIGVDRGENIPAVIALTDPEGCPLSRFKDSLGNPTHILRIGESYKEKQRTIQAKKEVEQRRAGGYSRKYASKAKNLADDMVRNTARDLLYYAVTQDAMLIFENLSRGFGRQGKRTFMAERQYTRMEDWLTAKLAYEGLPSKTYLSKTLAQYTSKTCSNCGFTITSADYDRVLEKLKKTATGWMTTINGKELKVEGQITYYNRYKRQNVVKDLSVELDRLSEESVNNDISSWTKGRSGEALSLLKKRFSHRPVQEKFVCLNCGFETHADEQAALNIARSWLFLRSQEYKKYQTNKTTGNTDKRAFVETWQSFYRKKLKEVWKPAV

SEQ ID NO: 40116 - protein, 978 aa, Artificial Sequence
  CasX variant
QEIKRINKIRRRLVKDSNTKKAGKTGPMKTLLVRVMTPDLRERLENLRKKPENIPQPISNTSRANLNKLLTDYTEMKKAILHVYWEEFQKDPVGLMSRVAQPASKKIDQNKLKPEMDEKGNLTTAGFACSQCGQPLFVYKLEQVSEKGKAYTNYFGRCNVAEHEKLILLAQLKPEKDSDEAVTYSLGKFGQRALDFYSIHVTKESTHPVKPLAQIAGNRYASGPVGKALSDACMGTIASFLSKYQDIIIEHQKVVKGNQKRLESLRELAGKENLEYPSVTLPPQPHTKEGVDAYNEVIARVRMWVNLNLWQKLKLSRDDAKPLLRLKGFPSFPLVERQANEVDWWDMVCNVKKLINEKKEDGKVFWQNLAGYKRQEALRPYLSSEEDRKKGKKFARYQLGDLLLHLEKKHGEDWGKVYGEAWERIDKKVEGLSKHIKLEEERRSEDAQSKAALTDWLRAKASFVIEGLKEADKDEFCRCELKLQKWYGDLRGKPFAIEAENSILDISGFSKQYNCAFIWQKDGVKKLNLYLIINYFKGGKLRFKKIKPEAFEANRFYTVINKKSGEIVPMEVNFNFDDPNLIILPLAFGKRQGREFIWNDLLSLETGSLKLANGRVIEKTLYNRRTRQDEPALFVALTFERREVLDSSNIKPMNLIGVDRGENIPAVIALTDPEGCPLSRFKDSLGNPTHILRIGESYKEKQRTIQAKKEVEQRRAGGYSRKYASKAKNLADDMVRNTARDLLYYAVTQDAMLIFENLSRGFGRQGKRTFMAERQYTRMEDWLTAKLAYEGLPSKTYLSKTLAQYTSKTCSNCGFTITSADYDRVLEKLKKTATGWMTTINGKELKVEGQITYYNRYKRQNVVKDLSVELDRLSEESVNNDISSWTKGRSGEALSLLKKRFSHRPVQEKFVCLNCGFETHADEQAALNIARSWLFLRSQEYKKYQTNKTTGNTDKRAFVETWQSFYRKKLKEVWKPAV

SEQ ID NO: 40117 - protein, 978 aa, Artificial Sequence
  CasX variant
QEIKRINKIRRRLVKDSNTKKAGKTGPMKTLLVRVMTPDLRERLENLRKKPENIPQPISNTSRANLNKLLTDYTEMKKAILHVYWEEFQKDPVGLMSRVAQPASKKIDQNKLKPEMDEKGNLTTAGFACSQCGQPLFVYKLEQVSEKGKAYTNYFGRCNVAEHEKLILLAQLKPEKDSDEAVTYSLGKFGQRALDFYSIHVTKESTHPVKPLAQIAGNRYASGPVGKALSDACMGTIASFLSKYQDIIIEHQKVVKGNQKRLESLRELAGKENLEYPSVTLPPQPHTKEGVDAYNEVIARVRMWVNLNLWQKLKLSRDDAKPLLRLKGFPSFPLVERQANEVDWWDMVCNVKKLINEKKEDGKVFWQNLAGYKRQEALRPYLSSEEDRKKGKKFARYQLGDLLLHLEKKHGEDWGKVYDEAWERIDKKVEGLSKHQKLEEERRSEDAQSKAALTDWLRAKASFVIEGLKEADKDEFCRCELKLQKWYGDLRGKPFAIEAENSILDISGFSKQYNCAFIWQKDGVKKLNLYLIINYFKGGKLRFKKIKPEAFEANRFYTVINKKSGEIVPMEVNFNFDDPNLIILPLAFGKRQGREFIWNDLLSLETGSLKLANGRVIEKTLYNRRTRQDEPALFVALTFERREVLDSSNIKPMNLIGVDRGENIPAVIALTDPEGCPLSRFKDSLGNPTHILRIGESYKEKQRTIQAKKEVEQRRAGGYSRKYASKAKNLADDMVRNTARDLLYYAVTQDAMLIFENLSRGFGRQGKRTFMAERQYTRMEDWLTAKLAYEGLPSKTYLSKTLAQYTSKTCSNCGFTITSADYDRVLEKLKKTATGWMTTINGKELKVEGQITYYNRYKRQNVVKDLSVELDRLSEESVNNDISSWTKGRSGEALSLLKKRFSHRPVQEKFVCLNCGFETHADEQAALNIARSWLFLRSQEYKKYQTNKTTGNTDKRAFVETWQSFYRKKLKEVWKPAV

SEQ ID NO: 40118 - protein, 978 aa, Artificial Sequence
  CasX variant
QEIKRINKIRRRLVKDSNTKKAGKTGPMKTLLVRVMTPDLRERLENLRKKPENIPQPISNTSRANLNKLLTDYTEMKKAILHVYWEEFQKDPVGLMSRVAQPASKKIDQNKLKPEMDEKGNLTTAGFACSQCGQPLFVYKLEQVSEKGKAYTNYFGRCNVAEHEKLILLAQLKPEKDSDEAVTYSLGKFGQRALDFYSIHVTKESTHPVKPLAQIAGNRYASGPVGKALSDACMGTIASFLSKYQDIIIEHQKVVKGNQKRLESLRELAGKENLEYPSVTLPPQPHTKEGVDAYNEVIARVRMWVNLNLWQKLKLSRDDAKPLLRLKGFPSFPLVERQANEVDWWDMVCNVKKLINEKKEDGKVFWQNLAGYKRQEALRPYLSSEEDRKKGKKFARYQLGDLLLHLEKKHGEDWGKVYDEAWERIDKKVEGLSKHIKLEEEDRSEDAQSKAALTDWLRAKASFVIEGLKEADKDEFCRCELKLQKWYGDLRGKPFAIEAENSILDISGFSKQYNCAFIWQKDGVKKLNLYLIINYFKGGKLRFKKIKPEAFEANRFYTVINKKSGEIVPMEVNFNFDDPNLIILPLAFGKRQGREFIWNDLLSLETGSLKLANGRVIEKTLYNRRTRQDEPALFVALTFERREVLDSSNIKPMNLIGVDRGENIPAVIALTDPEGCPLSRFKDSLGNPTHILRIGESYKEKQRTIQAKKEVEQRRAGGYSRKYASKAKNLADDMVRNTARDLLYYAVTQDAMLIFENLSRGFGRQGKRTFMAERQYTRMEDWLTAKLAYEGLPSKTYLSKTLAQYTSKTCSNCGFTITSADYDRVLEKLKKTATGWMTTINGKELKVEGQITYYNRYKRQNVVKDLSVELDRLSEESVNNDISSWTKGRSGEALSLLKKRFSHRPVQEKFVCLNCGFETHADEQAALNIARSWLFLRSQEYKKYQTNKTTGNTDKRAFVETWQSFYRKKLKEVWKPAV

SEQ ID NO: 40119 - protein, 978 aa, Artificial Sequence
  CasX variant
QEIKRINKIRRRLVKDSNTKKAGKTGPMKTLLVRVMTPDLRERLENLRKKPENIPQPISNTSRANLNKLLTDYTEMKKAILHVYWEEFQKDPVGLMSRVAQPASKKIDQNKLKPEMDEKGNLTTAGFACSQCGQPLFVYKLEQVSEKGKAYTNYFGRCNVAEHEKLILLAQLKPEKDSDEAVTYSLGKFGQRALDFYSIHVTKESTHPVKPLAQIAGNRYASGPVGKALSDACMGTIASFLSKYQDIIIEHQKVVKGNQKRLESLRELAGKENLEYPSVTLPPQPHTKEGVDAYNEVIARVRMWVNLNLWQKLKLSRDDAKPLLRLKGFPSFPLVERQANEVDWWDMVCNVKKLINEKKEDGKVFWQNLAGYKRQEALRPYLSSEEDRKKGKKFARYQLGDLLLHLEKKHGEDWGKVYDEAWERIDKKVEGLSKHIKLEEERRSEDAQSKAATTDWLRAKASFVIEGLKEADKDEFCRCELKLQKWYGDLRGKPFAIEAENSILDISGFSKQYNCAFIWQKDGVKKLNLYLIINYFKGGKLRFKKIKPEAFEANRFYTVINKKSGEIVPMEVNFNFDDPNLIILPLAFGKRQGREFIWNDLLSLETGSLKLANGRVIEKTLYNRRTRQDEPALFVALTFERREVLDSSNIKPMNLIGVDRGENIPAVIALTDPEGCPLSRFKDSLGNPTHILRIGESYKEKQRTIQAKKEVEQRRAGGYSRKYASKAKNLADDMVRNTARDLLYYAVTQDAMLIFENLSRGFGRQGKRTFMAERQYTRMEDWLTAKLAYEGLPSKTYLSKTLAQYTSKTCSNCGFTITSADYDRVLEKLKKTATGWMTTINGKELKVEGQITYYNRYKRQNVVKDLSVELDRLSEESVNNDISSWTKGRSGEALSLLKKRFSHRPVQEKFVCLNCGFETHADEQAALNIARSWLFLRSQEYKKYQTNKTTGNTDKRAFVETWQSFYRKKLKEVWKPAV

SEQ ID NO: 40120 - protein, 978 aa, Artificial Sequence
  CasX variant
QEIKRINKIRRRLVKDSNTKKAGKTGPMKTLLVRVMTPDLRERLENLRKKPENIPQPISNTSRANLNKLLTDYTEMKKAILHVYWEEFQKDPVGLMSRVAQPASKKIDQNKLKPEMDEKGNLTTAGFACSQCGQPLFVYKLEQVSEKGKAYTNYFGRCNVAEHEKLILLAQLKPEKDSDEAVTYSLGKFGQRALDFYSIHVTKESTHPVKPLAQIAGNRYASGPVGKALSDACMGTIASFLSKYQDIIIEHQKVVKGNQKRLESLRELAGKENLEYPSVTLPPQPHTKEGVDAYNEVIARVRMWVNLNLWQKLKLSRDDAKPLLRLKGFPSFPLVERQANEVDWWDMVCNVKKLINEKKEDGKVFWQNLAGYKRQEALRPYLSSEEDRKKGKKFARYQLGDLLLHLEKKHGEDWGKVYDEAWERIDKKVEGLSKHIKLEEERRSEDAQSKAALTDWLRAKTSFVIEGLKEADKDEFCRCELKLQKWYGDLRGKPFAIEAENSILDISGFSKQYNCAFIWQKDGVKKLNLYLIINYFKGGKLRFKKIKPEAFEANRFYTVINKKSGEIVPMEVNFNFDDPNLIILPLAFGKRQGREFIWNDLLSLETGSLKLANGRVIEKTLYNRRTRQDEPALFVALTFERREVLDSSNIKPMNLIGVDRGENIPAVIALTDPEGCPLSRFKDSLGNPTHILRIGESYKEKQRTIQAKKEVEQRRAGGYSRKYASKAKNLADDMVRNTARDLLYYAVTQDAMLIFENLSRGFGRQGKRTFMAERQYTRMEDWLTAKLAYEGLPSKTYLSKTLAQYTSKTCSNCGFTITSADYDRVLEKLKKTATGWMTTINGKELKVEGQITYYNRYKRQNVVKDLSVELDRLSEESVNNDISSWTKGRSGEALSLLKKRFSHRPVQEKFVCLNCGFETHADEQAALNIARSWLFLRSQEYKKYQTNKTTGNTDKRAFVETWQSFYRKKLKEVWKPAV

SEQ ID NO: 40121 - protein, 978 aa, Artificial Sequence
  CasX variant
QEIKRINKIRRRLVKDSNTKKAGKTGPMKTLLVRVMTPDLRERLENLRKKPENIPQPISNTSRANLNKLLTDYTEMKKAILHVYWEEFQKDPVGLMSRVAQPASKKIDQNKLKPEMDEKGNLTTAGFACSQCGQPLFVYKLEQVSEKGKAYTNYFGRCNVAEHEKLILLAQLKPEKDSDEAVTYSLGKFGQRALDFYSIHVTKESTHPVKPLAQIAGNRYASGPVGKALSDACMGTIASFLSKYQDIIIEHQKVVKGNQKRLESLRELAGKENLEYPSVTLPPQPHTKEGVDAYNEVIARVRMWVNLNLWQKLKLSRDDAKPLLRLKGFPSFPLVERQANEVDWWDMVCNVKKLINEKKEDGKVFWQNLAGYKRQEALRPYLSSEEDRKKGKKFARYQLGDLLLHLEKKHGEDWGKVYDEAWERIDKKVEGLSKHIKLEEERRSEDAQSKAALTDWLRAKKSFVIEGLKEADKDEFCRCELKLQKWYGDLRGKPFAIEAENSILDISGFSKQYNCAFIWQKDGVKKLNLYLIINYFKGGKLRFKKIKPEAFEANRFYTVINKKSGEIVPMEVNFNFDDPNLIILPLAFGKRQGREFIWNDLLSLETGSLKLANGRVIEKTLYNRRTRQDEPALFVALTFERREVLDSSNIKPMNLIGVDRGENIPAVIALTDPEGCPLSRFKDSLGNPTHILRIGESYKEKQRTIQAKKEVEQRRAGGYSRKYASKAKNLADDMVRNTARDLLYYAVTQDAMLIFENLSRGFGRQGKRTFMAERQYTRMEDWLTAKLAYEGLPSKTYLSKTLAQYTSKTCSNCGFTITSADYDRVLEKLKKTATGWMTTINGKELKVEGQITYYNRYKRQNVVKDLSVELDRLSEESVNNDISSWTKGRSGEALSLLKKRFSHRPVQEKFVCLNCGFETHADEQAALNIARSWLFLRSQEYKKYQTNKTTGNTDKRAFVETWQSFYRKKLKEVWKPAV

SEQ ID NO: 40122 - protein, 978 aa, Artificial Sequence
  CasX variant
QEIKRINKIRRRLVKDSNTKKAGKTGPMKTLLVRVMTPDLRERLENLRKKPENIPQPISNTSRANLNKLLTDYTEMKKAILHVYWEEFQKDPVGLMSRVAQPASKKIDQNKLKPEMDEKGNLTTAGFACSQCGQPLFVYKLEQVSEKGKAYTNYFGRCNVAEHEKLILLAQLKPEKDSDEAVTYSLGKFGQRALDFYSIHVTKESTHPVKPLAQIAGNRYASGPVGKALSDACMGTIASFLSKYQDIIIEHQKVVKGNQKRLESLRELAGKENLEYPSVTLPPQPHTKEGVDAYNEVIARVRMWVNLNLWQKLKLSRDDAKPLLRLKGFPSFPLVERQANEVDWWDMVCNVKKLINEKKEDGKVFWQNLAGYKRQEALRPYLSSEEDRKKGKKFARYQLGDLLLHLEKKHGEDWGKVYDEAWERIDKKVEGLSKHIKLEEERRSEDAQSKAALTDWLRAKASFVEEGLKEADKDEFCRCELKLQKWYGDLRGKPFAIEAENSILDISGFSKQYNCAFIWQKDGVKKLNLYLIINYFKGGKLRFKKIKPEAFEANRFYTVINKKSGEIVPMEVNFNFDDPNLIILPLAFGKRQGREFIWNDLLSLETGSLKLANGRVIEKTLYNRRTRQDEPALFVALTFERREVLDSSNIKPMNLIGVDRGENIPAVIALTDPEGCPLSRFKDSLGNPTHILRIGESYKEKQRTIQAKKEVEQRRAGGYSRKYASKAKNLADDMVRNTARDLLYYAVTQDAMLIFENLSRGFGRQGKRTFMAERQYTRMEDWLTAKLAYEGLPSKTYLSKTLAQYTSKTCSNCGFTITSADYDRVLEKLKKTATGWMTTINGKELKVEGQITYYNRYKRQNVVKDLSVELDRLSEESVNNDISSWTKGRSGEALSLLKKRFSHRPVQEKFVCLNCGFETHADEQAALNIARSWLFLRSQEYKKYQTNKTTGNTDKRAFVETWQSFYRKKLKEVWKPAV

SEQ ID NO: 40123 - protein, 979 aa, Artificial Sequence
  CasX variant
QEIKRINKIRRRLVKDSNTKKAGKTGPMKTLLVRVMTPDLRERLENLRKKPENIPQPISNTSRANLNKLLTDYTEMKKAILHVYWEEFQKDPVGLMSRVAQPASKKIDQNKLKPEMDEKGNLTTAGFACSQCGQPLFVYKLEQVSEKGKAYTNYFGRCNVAEHEKLILLAQLKPEKDSDEAVTYSLGKFGQRALDFYSIHVTKESTHPVKPLAQIAGNRYASGPVGKALSDACMGTIASFLSKYQDIIIEHQKVVKGNQKRLESLRELAGKENLEYPSVTLPPQPHTKEGVDAYNEVIARVRMWVNLNLWQKLKLSRDDAKPLLRLKGFPSFPLVERQANEVDWWDMVCNVKKLINEKKEDGKVFWQNLAGYKRQEALRPYLSSEEDRKKGKKFARYQLGDLLLHLEKKHGEDWGKVYDEAWERIDKKVEGLSKHIKLEEERRSEDAQSKAALTDWLRAKASFVISEGLKEADKDEFCRCELKLQKWYGDLRGKPFAIEAENSILDISGFSKQYNCAFIWQKDGVKKLNLYLIINYFKGGKLRFKKIKPEAFEANRFYTVINKKSGEIVPMEVNFNFDDPNLIILPLAFGKRQGREFIWNDLLSLETGSLKLANGRVIEKTLYNRRTRQDEPALFVALTFERREVLDSSNIKPMNLIGVDRGENIPAVIALTDPEGCPLSRFKDSLGNPTHILRIGESYKEKQRTIQAKKEVEQRRAGGYSRKYASKAKNLADDMVRNTARDLLYYAVTQDAMLIFENLSRGFGRQGKRTFMAERQYTRMEDWLTAKLAYEGLPSKTYLSKTLAQYTSKTCSNCGFTITSADYDRVLEKLKKTATGWMTTINGKELKVEGQITYYNRYKRQNVVKDLSVELDRLSEESVNNDISSWTKGRSGEALSLLKKRFSHRPVQEKFVCLNCGFETHADEQAALNIARSWLFLRSQEYKKYQTNKTTGNTDKRAFVETWQSFYRKKLKEVWKPAV

SEQ ID NO: 40124 - protein, 979 aa, Artificial Sequence
  CasX variant
QEIKRINKIRRRLVKDSNTKKAGKTGPMKTLLVRVMTPDLRERLENLRKKPENIPQPISNTSRANLNKLLTDYTEMKKAILHVYWEEFQKDPVGLMSRVAQPASKKIDQNKLKPEMDEKGNLTTAGFACSQCGQPLFVYKLEQVSEKGKAYTNYFGRCNVAEHEKLILLAQLKPEKDSDEAVTYSLGKFGQRALDFYSIHVTKESTHPVKPLAQIAGNRYASGPVGKALSDACMGTIASFLSKYQDIIIEHQKVVKGNQKRLESLRELAGKENLEYPSVTLPPQPHTKEGVDAYNEVIARVRMWVNLNLWQKLKLSRDDAKPLLRLKGFPSFPLVERQANEVDWWDMVCNVKKLINEKKEDGKVFWQNLAGYKRQEALRPYLSSEEDRKKGKKFARYQLGDLLLHLEKKHGEDWGKVYDEAWERIDKKVEGLSKHIKLEEERRSEDAQSKAALTDWLRAKASFVIERGLKEADKDEFCRCELKLQKWYGDLRGKPFAIEAENSILDISGFSKQYNCAFIWQKDGVKKLNLYLIINYFKGGKLRFKKIKPEAFEANRFYTVINKKSGEIVPMEVNFNFDDPNLIILPLAFGKRQGREFIWNDLLSLETGSLKLANGRVIEKTLYNRRTRQDEPALFVALTFERREVLDSSNIKPMNLIGVDRGENIPAVIALTDPEGCPLSRFKDSLGNPTHILRIGESYKEKQRTIQAKKEVEQRRAGGYSRKYASKAKNLADDMVRNTARDLLYYAVTQDAMLIFENLSRGFGRQGKRTFMAERQYTRMEDWLTAKLAYEGLPSKTYLSKTLAQYTSKTCSNCGFTITSADYDRVLEKLKKTATGWMTTINGKELKVEGQITYYNRYKRQNVVKDLSVELDRLSEESVNNDISSWTKGRSGEALSLLKKRFSHRPVQEKFVCLNCGFETHADEQAALNIARSWLFLRSQEYKKYQTNKTTGNTDKRAFVETWQSFYRKKLKEVWKPAV

SEQ ID NO: 40125 - protein, 978 aa, Artificial Sequence
  CasX variant
QEIKRINKIRRRLVKDSNTKKAGKTGPMKTLLVRVMTPDLRERLENLRKKPENIPQPISNTSRANLNKLLTDYTEMKKAILHVYWEEFQKDPVGLMSRVAQPASKKIDQNKLKPEMDEKGNLTTAGFACSQCGQPLFVYKLEQVSEKGKAYTNYFGRCNVAEHEKLILLAQLKPEKDSDEAVTYSLGKFGQRALDFYSIHVTKESTHPVKPLAQIAGNRYASGPVGKALSDACMGTIASFLSKYQDIIIEHQKVVKGNQKRLESLRELAGKENLEYPSVTLPPQPHTKEGVDAYNEVIARVRMWVNLNLWQKLKLSRDDAKPLLRLKGFPSFPLVERQANEVDWWDMVCNVKKLINEKKEDGKVFWQNLAGYKRQEALRPYLSSEEDRKKGKKFARYQLGDLLLHLEKKHGEDWGKVYDEAWERIDKKVEGLSKHIKLEEERRSEDAQSKAALTDWLRAKASFVIEGKKEADKDEFCRCELKLQKWYGDLRGKPFAIEAENSILDISGFSKQYNCAFIWQKDGVKKLNLYLIINYFKGGKLRFKKIKPEAFEANRFYTVINKKSGEIVPMEVNFNFDDPNLIILPLAFGKRQGREFIWNDLLSLETGSLKLANGRVIEKTLYNRRTRQDEPALFVALTFERREVLDSSNIKPMNLIGVDRGENIPAVIALTDPEGCPLSRFKDSLGNPTHILRIGESYKEKQRTIQAKKEVEQRRAGGYSRKYASKAKNLADDMVRNTARDLLYYAVTQDAMLIFENLSRGFGRQGKRTFMAERQYTRMEDWLTAKLAYEGLPSKTYLSKTLAQYTSKTCSNCGFTITSADYDRVLEKLKKTATGWMTTINGKELKVEGQITYYNRYKRQNVVKDLSVELDRLSEESVNNDISSWTKGRSGEALSLLKKRFSHRPVQEKFVCLNCGFETHADEQAALNIARSWLFLRSQEYKKYQTNKTTGNTDKRAFVETWQSFYRKKLKEVWKPAV

SEQ ID NO: 40126 - protein, 978 aa, Artificial Sequence
  CasX variant
QEIKRINKIRRRLVKDSNTKKAGKTGPMKTLLVRVMTPDLRERLENLRKKPENIPQPISNTSRANLNKLLTDYTEMKKAILHVYWEEFQKDPVGLMSRVAQPASKKIDQNKLKPEMDEKGNLTTAGFACSQCGQPLFVYKLEQVSEKGKAYTNYFGRCNVAEHEKLILLAQLKPEKDSDEAVTYSLGKFGQRALDFYSIHVTKESTHPVKPLAQIAGNRYASGPVGKALSDACMGTIASFLSKYQDIIIEHQKVVKGNQKRLESLRELAGKENLEYPSVTLPPQPHTKEGVDAYNEVIARVRMWVNLNLWQKLKLSRDDAKPLLRLKGFPSFPLVERQANEVDWWDMVCNVKKLINEKKEDGKVFWQNLAGYKRQEALRPYLSSEEDRKKGKKFARYQLGDLLLHLEKKHGEDWGKVYDEAWERIDKKVEGLSKHIKLEEERRSEDAQSKAALTDWLRAKASFVIEGSKEADKDEFCRCELKLQKWYGDLRGKPFAIEAENSILDISGFSKQYNCAFIWQKDGVKKLNLYLIINYFKGGKLRFKKIKPEAFEANRFYTVINKKSGEIVPMEVNFNFDDPNLIILPLAFGKRQGREFIWNDLLSLETGSLKLANGRVIEKTLYNRRTRQDEPALFVALTFERREVLDSSNIKPMNLIGVDRGENIPAVIALTDPEGCPLSRFKDSLGNPTHILRIGESYKEKQRTIQAKKEVEQRRAGGYSRKYASKAKNLADDMVRNTARDLLYYAVTQDAMLIFENLSRGFGRQGKRTFMAERQYTRMEDWLTAKLAYEGLPSKTYLSKTLAQYTSKTCSNCGFTITSADYDRVLEKLKKTATGWMTTINGKELKVEGQITYYNRYKRQNVVKDLSVELDRLSEESVNNDISSWTKGRSGEALSLLKKRFSHRPVQEKFVCLNCGFETHADEQAALNIARSWLFLRSQEYKKYQTNKTTGNTDKRAFVETWQSFYRKKLKEVWKPAV

SEQ ID NO: 40127 - protein, 979 aa, Artificial Sequence
  CasX variant
QEIKRINKIRRRLVKDSNTKKAGKTGPMKTLLVRVMTPDLRERLENLRKKPENIPQPISNTSRANLNKLLTDYTEMKKAILHVYWEEFQKDPVGLMSRVAQPASKKIDQNKLKPEMDEKGNLTTAGFACSQCGQPLFVYKLEQVSEKGKAYTNYFGRCNVAEHEKLILLAQLKPEKDSDEAVTYSLGKFGQRALDFYSIHVTKESTHPVKPLAQIAGNRYASGPVGKALSDACMGTIASFLSKYQDIIIEHQKVVKGNQKRLESLRELAGKENLEYPSVTLPPQPHTKEGVDAYNEVIARVRMWVNLNLWQKLKLSRDDAKPLLRLKGFPSFPLVERQANEVDWWDMVCNVKKLINEKKEDGKVFWQNLAGYKRQEALRPYLSSEEDRKKGKKFARYQLGDLLLHLEKKHGEDWGKVYDEAWERIDKKVEGLSKHIKLEEERRSEDAQSKAALTDWLRAKASFVIEGLKEADDKDEFCRCELKLQKWYGDLRGKPFAIEAENSILDISGFSKQYNCAFIWQKDGVKKLNLYLIINYFKGGKLRFKKIKPEAFEANRFYTVINKKSGEIVPMEVNFNFDDPNLIILPLAFGKRQGREFIWNDLLSLETGSLKLANGRVIEKTLYNRRTRQDEPALFVALTFERREVLDSSNIKPMNLIGVDRGENIPAVIALTDPEGCPLSRFKDSLGNPTHILRIGESYKEKQRTIQAKKEVEQRRAGGYSRKYASKAKNLADDMVRNTARDLLYYAVTQDAMLIFENLSRGFGRQGKRTFMAERQYTRMEDWLTAKLAYEGLPSKTYLSKTLAQYTSKTCSNCGFTITSADYDRVLEKLKKTATGWMTTINGKELKVEGQITYYNRYKRQNVVKDLSVELDRLSEESVNNDISSWTKGRSGEALSLLKKRFSHRPVQEKFVCLNCGFETHADEQAALNIARSWLFLRSQEYKKYQTNKTTGNTDKRAFVETWQSFYRKKLKEVWKPAV

SEQ ID NO: 40128 - protein, 979 aa, Artificial Sequence
  CasX variant
QEIKRINKIRRRLVKDSNTKKAGKTGPMKTLLVRVMTPDLRERLENLRKKPENIPQPISNTSRANLNKLLTDYTEMKKAILHVYWEEFQKDPVGLMSRVAQPASKKIDQNKLKPEMDEKGNLTTAGFACSQCGQPLFVYKLEQVSEKGKAYTNYFGRCNVAEHEKLILLAQLKPEKDSDEAVTYSLGKFGQRALDFYSIHVTKESTHPVKPLAQIAGNRYASGPVGKALSDACMGTIASFLSKYQDIIIEHQKVVKGNQKRLESLRELAGKENLEYPSVTLPPQPHTKEGVDAYNEVIARVRMWVNLNLWQKLKLSRDDAKPLLRLKGFPSFPLVERQANEVDWWDMVCNVKKLINEKKEDGKVFWQNLAGYKRQEALRPYLSSEEDRKKGKKFARYQLGDLLLHLEKKHGEDWGKVYDEAWERIDKKVEGLSKHIKLEEERRSEDAQSKAALTDWLRAKASFVIEGLKEADKDQEFCRCELKLQKWYGDLRGKPFAIEAENSILDISGFSKQYNCAFIWQKDGVKKLNLYLIINYFKGGKLRFKKIKPEAFEANRFYTVINKKSGEIVPMEVNFNFDDPNLIILPLAFGKRQGREFIWNDLLSLETGSLKLANGRVIEKTLYNRRTRQDEPALFVALTFERREVLDSSNIKPMNLIGVDRGENIPAVIALTDPEGCPLSRFKDSLGNPTHILRIGESYKEKQRTIQAKKEVEQRRAGGYSRKYASKAKNLADDMVRNTARDLLYYAVTQDAMLIFENLSRGFGRQGKRTFMAERQYTRMEDWLTAKLAYEGLPSKTYLSKTLAQYTSKTCSNCGFTITSADYDRVLEKLKKTATGWMTTINGKELKVEGQITYYNRYKRQNVVKDLSVELDRLSEESVNNDISSWTKGRSGEALSLLKKRFSHRPVQEKFVCLNCGFETHADEQAALNIARSWLFLRSQEYKKYQTNKTTGNTDKRAFVETWQSFYRKKLKEVWKPAV

SEQ ID NO: 40129 - protein, 978 aa, Artificial Sequence
  CasX variant
QEIKRINKIRRRLVKDSNTKKAGKTGPMKTLLVRVMTPDLRERLENLRKKPENIPQPISNTSRANLNKLLTDYTEMKKAILHVYWEEFQKDPVGLMSRVAQPASKKIDQNKLKPEMDEKGNLTTAGFACSQCGQPLFVYKLEQVSEKGKAYTNYFGRCNVAEHEKLILLAQLKPEKDSDEAVTYSLGKFGQRALDFYSIHVTKESTHPVKPLAQIAGNRYASGPVGKALSDACMGTIASFLSKYQDIIIEHQKVVKGNQKRLESLRELAGKENLEYPSVTLPPQPHTKEGVDAYNEVIARVRMWVNLNLWQKLKLSRDDAKPLLRLKGFPSFPLVERQANEVDWWDMVCNVKKLINEKKEDGKVFWQNLAGYKRQEALRPYLSSEEDRKKGKKFARYQLGDLLLHLEKKHGEDWGKVYDEAWERIDKKVEGLSKHIKLEEERRSEDAQSKAALTDWLRAKASFVIEGLKEADKDEKCRCELKLQKWYGDLRGKPFAIEAENSILDISGFSKQYNCAFIWQKDGVKKLNLYLIINYFKGGKLRFKKIKPEAFEANRFYTVINKKSGEIVPMEVNFNFDDPNLIILPLAFGKRQGREFIWNDLLSLETGSLKLANGRVIEKTLYNRRTRQDEPALFVALTFERREVLDSSNIKPMNLIGVDRGENIPAVIALTDPEGCPLSRFKDSLGNPTHILRIGESYKEKQRTIQAKKEVEQRRAGGYSRKYASKAKNLADDMVRNTARDLLYYAVTQDAMLIFENLSRGFGRQGKRTFMAERQYTRMEDWLTAKLAYEGLPSKTYLSKTLAQYTSKTCSNCGFTITSADYDRVLEKLKKTATGWMTTINGKELKVEGQITYYNRYKRQNVVKDLSVELDRLSEESVNNDISSWTKGRSGEALSLLKKRFSHRPVQEKFVCLNCGFETHADEQAALNIARSWLFLRSQEYKKYQTNKTTGNTDKRAFVETWQSFYRKKLKEVWKPAV

SEQ ID NO: 40130 - protein, 978 aa, Artificial Sequence
  CasX variant
QEIKRINKIRRRLVKDSNTKKAGKTGPMKTLLVRVMTPDLRERLENLRKKPENIPQPISNTSRANLNKLLTDYTEMKKAILHVYWEEFQKDPVGLMSRVAQPASKKIDQNKLKPEMDEKGNLTTAGFACSQCGQPLFVYKLEQVSEKGKAYTNYFGRCNVAEHEKLILLAQLKPEKDSDEAVTYSLGKFGQRALDFYSIHVTKESTHPVKPLAQIAGNRYASGPVGKALSDACMGTIASFLSKYQDIIIEHQKVVKGNQKRLESLRELAGKENLEYPSVTLPPQPHTKEGVDAYNEVIARVRMWVNLNLWQKLKLSRDDAKPLLRLKGFPSFPLVERQANEVDWWDMVCNVKKLINEKKEDGKVFWQNLAGYKRQEALRPYLSSEEDRKKGKKFARYQLGDLLLHLEKKHGEDWGKVYDEAWERIDKKVEGLSKHIKLEEERRSEDAQSKAALTDWLRAKASFVIEGLKEADKDEFCRDELKLQKWYGDLRGKPFAIEAENSILDISGFSKQYNCAFIWQKDGVKKLNLYLIINYFKGGKLRFKKIKPEAFEANRFYTVINKKSGEIVPMEVNFNFDDPNLIILPLAFGKRQGREFIWNDLLSLETGSLKLANGRVIEKTLYNRRTRQDEPALFVALTFERREVLDSSNIKPMNLIGVDRGENIPAVIALTDPEGCPLSRFKDSLGNPTHILRIGESYKEKQRTIQAKKEVEQRRAGGYSRKYASKAKNLADDMVRNTARDLLYYAVTQDAMLIFENLSRGFGRQGKRTFMAERQYTRMEDWLTAKLAYEGLPSKTYLSKTLAQYTSKTCSNCGFTITSADYDRVLEKLKKTATGWMTTINGKELKVEGQITYYNRYKRQNVVKDLSVELDRLSEESVNNDISSWTKGRSGEALSLLKKRFSHRPVQEKFVCLNCGFETHADEQAALNIARSWLFLRSQEYKKYQTNKTTGNTDKRAFVETWQSFYRKKLKEVWKPAV

SEQ ID NO: 40131 - protein, 979 aa, Artificial Sequence
  CasX variant
QEIKRINKIRRRLVKDSNTKKAGKTGPMKTLLVRVMTPDLRERLENLRKKPENIPQPISNTSRANLNKLLTDYTEMKKAILHVYWEEFQKDPVGLMSRVAQPASKKIDQNKLKPEMDEKGNLTTAGFACSQCGQPLFVYKLEQVSEKGKAYTNYFGRCNVAEHEKLILLAQLKPEKDSDEAVTYSLGKFGQRALDFYSIHVTKESTHPVKPLAQIAGNRYASGPVGKALSDACMGTIASFLSKYQDIIIEHQKVVKGNQKRLESLRELAGKENLEYPSVTLPPQPHTKEGVDAYNEVIARVRMWVNLNLWQKLKLSRDDAKPLLRLKGFPSFPLVERQANEVDWWDMVCNVKKLINEKKEDGKVFWQNLAGYKRQEALRPYLSSEEDRKKGKKFARYQLGDLLLHLEKKHGEDWGKVYDEAWERIDKKVEGLSKHIKLEEERRSEDAQSKAALTDWLRAKASFVIEGLKEADKDEFCRCVELKLQKWYGDLRGKPFAIEAENSILDISGFSKQYNCAFIWQKDGVKKLNLYLIINYFKGGKLRFKKIKPEAFEANRFYTVINKKSGEIVPMEVNFNFDDPNLIILPLAFGKRQGREFIWNDLLSLETGSLKLANGRVIEKTLYNRRTRQDEPALFVALTFERREVLDSSNIKPMNLIGVDRGENIPAVIALTDPEGCPLSRFKDSLGNPTHILRIGESYKEKQRTIQAKKEVEQRRAGGYSRKYASKAKNLADDMVRNTARDLLYYAVTQDAMLIFENLSRGFGRQGKRTFMAERQYTRMEDWLTAKLAYEGLPSKTYLSKTLAQYTSKTCSNCGFTITSADYDRVLEKLKKTATGWMTTINGKELKVEGQITYYNRYKRQNVVKDLSVELDRLSEESVNNDISSWTKGRSGEALSLLKKRFSHRPVQEKFVCLNCGFETHADEQAALNIARSWLFLRSQEYKKYQTNKTTGNTDKRAFVETWQSFYRKKLKEVWKPAV

SEQ ID NO: 40132 - protein, 978 aa, Artificial Sequence
  CasX variant
QEIKRINKIRRRLVKDSNTKKAGKTGPMKTLLVRVMTPDLRERLENLRKKPENIPQPISNTSRANLNKLLTDYTEMKKAILHVYWEEFQKDPVGLMSRVAQPASKKIDQNKLKPEMDEKGNLTTAGFACSQCGQPLFVYKLEQVSEKGKAYTNYFGRCNVAEHEKLILLAQLKPEKDSDEAVTYSLGKFGQRALDFYSIHVTKESTHPVKPLAQIAGNRYASGPVGKALSDACMGTIASFLSKYQDIIIEHQKVVKGNQKRLESLRELAGKENLEYPSVTLPPQPHTKEGVDAYNEVIARVRMWVNLNLWQKLKLSRDDAKPLLRLKGFPSFPLVERQANEVDWWDMVCNVKKLINEKKEDGKVFWQNLAGYKRQEALRPYLSSEEDRKKGKKFARYQLGDLLLHLEKKHGEDWGKVYDEAWERIDKKVEGLSKHIKLEEERRSEDAQSKAALTDWLRAKASFVIEGLKEADKDEFCRCDLKLQKWYGDLRGKPFAIEAENSILDISGFSKQYNCAFIWQKDGVKKLNLYLIINYFKGGKLRFKKIKPEAFEANRFYTVINKKSGEIVPMEVNFNFDDPNLIILPLAFGKRQGREFIWNDLLSLETGSLKLANGRVIEKTLYNRRTRQDEPALFVALTFERREVLDSSNIKPMNLIGVDRGENIPAVIALTDPEGCPLSRFKDSLGNPTHILRIGESYKEKQRTIQAKKEVEQRRAGGYSRKYASKAKNLADDMVRNTARDLLYYAVTQDAMLIFENLSRGFGRQGKRTFMAERQYTRMEDWLTAKLAYEGLPSKTYLSKTLAQYTSKTCSNCGFTITSADYDRVLEKLKKTATGWMTTINGKELKVEGQITYYNRYKRQNVVKDLSVELDRLSEESVNNDISSWTKGRSGEALSLLKKRFSHRPVQEKFVCLNCGFETHADEQAALNIARSWLFLRSQEYKKYQTNKTTGNTDKRAFVETWQSFYRKKLKEVWKPAV

SEQ ID NO: 40133 - protein, 978 aa, Artificial Sequence
  CasX variant
QEIKRINKIRRRLVKDSNTKKAGKTGPMKTLLVRVMTPDLRERLENLRKKPENIPQPISNTSRANLNKLLTDYTEMKKAILHVYWEEFQKDPVGLMSRVAQPASKKIDQNKLKPEMDEKGNLTTAGFACSQCGQPLFVYKLEQVSEKGKAYTNYFGRCNVAEHEKLILLAQLKPEKDSDEAVTYSLGKFGQRALDFYSIHVTKESTHPVKPLAQIAGNRYASGPVGKALSDACMGTIASFLSKYQDIIIEHQKVVKGNQKRLESLRELAGKENLEYPSVTLPPQPHTKEGVDAYNEVIARVRMWVNLNLWQKLKLSRDDAKPLLRLKGFPSFPLVERQANEVDWWDMVCNVKKLINEKKEDGKVFWQNLAGYKRQEALRPYLSSEEDRKKGKKFARYQLGDLLLHLEKKHGEDWGKVYDEAWERIDKKVEGLSKHIKLEEERRSEDAQSKAALTDWLRAKASFVIEGLKEADKDEFCRCERKLQKWYGDLRGKPFAIEAENSILDISGFSKQYNCAFIWQKDGVKKLNLYLIINYFKGGKLRFKKIKPEAFEANRFYTVINKKSGEIVPMEVNFNFDDPNLIILPLAFGKRQGREFIWNDLLSLETGSLKLANGRVIEKTLYNRRTRQDEPALFVALTFERREVLDSSNIKPMNLIGVDRGENIPAVIALTDPEGCPLSRFKDSLGNPTHILRIGESYKEKQRTIQAKKEVEQRRAGGYSRKYASKAKNLADDMVRNTARDLLYYAVTQDAMLIFENLSRGFGRQGKRTFMAERQYTRMEDWLTAKLAYEGLPSKTYLSKTLAQYTSKTCSNCGFTITSADYDRVLEKLKKTATGWMTTINGKELKVEGQITYYNRYKRQNVVKDLSVELDRLSEESVNNDISSWTKGRSGEALSLLKKRFSHRPVQEKFVCLNCGFETHADEQAALNIARSWLFLRSQEYKKYQTNKTTGNTDKRAFVETWQSFYRKKLKEVWKPAV

SEQ ID NO: 40134 - protein, 978 aa, Artificial Sequence
  CasX variant
QEIKRINKIRRRLVKDSNTKKAGKTGPMKTLLVRVMTPDLRERLENLRKKPENIPQPISNTSRANLNKLLTDYTEMKKAILHVYWEEFQKDPVGLMSRVAQPASKKIDQNKLKPEMDEKGNLTTAGFACSQCGQPLFVYKLEQVSEKGKAYTNYFGRCNVAEHEKLILLAQLKPEKDSDEAVTYSLGKFGQRALDFYSIHVTKESTHPVKPLAQIAGNRYASGPVGKALSDACMGTIASFLSKYQDIIIEHQKVVKGNQKRLESLRELAGKENLEYPSVTLPPQPHTKEGVDAYNEVIARVRMWVNLNLWQKLKLSRDDAKPLLRLKGFPSFPLVERQANEVDWWDMVCNVKKLINEKKEDGKVFWQNLAGYKRQEALRPYLSSEEDRKKGKKFARYQLGDLLLHLEKKHGEDWGKVYDEAWERIDKKVEGLSKHIKLEEERRSEDAQSKAALTDWLRAKASFVIEGLKEADKDEFCRCELKHQKWYGDLRGKPFAIEAENSILDISGFSKQYNCAFIWQKDGVKKLNLYLIINYFKGGKLRFKKIKPEAFEANRFYTVINKKSGEIVPMEVNFNFDDPNLIILPLAFGKRQGREFIWNDLLSLETGSLKLANGRVIEKTLYNRRTRQDEPALFVALTFERREVLDSSNIKPMNLIGVDRGENIPAVIALTDPEGCPLSRFKDSLGNPTHILRIGESYKEKQRTIQAKKEVEQRRAGGYSRKYASKAKNLADDMVRNTARDLLYYAVTQDAMLIFENLSRGFGRQGKRTFMAERQYTRMEDWLTAKLAYEGLPSKTYLSKTLAQYTSKTCSNCGFTITSADYDRVLEKLKKTATGWMTTINGKELKVEGQITYYNRYKRQNVVKDLSVELDRLSEESVNNDISSWTKGRSGEALSLLKKRFSHRPVQEKFVCLNCGFETHADEQAALNIARSWLFLRSQEYKKYQTNKTTGNTDKRAFVETWQSFYRKKLKEVWKPAV

SEQ ID NO: 40135 - protein, 978 aa, Artificial Sequence
  CasX variant
QEIKRINKIRRRLVKDSNTKKAGKTGPMKTLLVRVMTPDLRERLENLRKKPENIPQPISNTSRANLNKLLTDYTEMKKAILHVYWEEFQKDPVGLMSRVAQPASKKIDQNKLKPEMDEKGNLTTAGFACSQCGQPLFVYKLEQVSEKGKAYTNYFGRCNVAEHEKLILLAQLKPEKDSDEAVTYSLGKFGQRALDFYSIHVTKESTHPVKPLAQIAGNRYASGPVGKALSDACMGTIASFLSKYQDIIIEHQKVVKGNQKRLESLRELAGKENLEYPSVTLPPQPHTKEGVDAYNEVIARVRMWVNLNLWQKLKLSRDDAKPLLRLKGFPSFPLVERQANEVDWWDMVCNVKKLINEKKEDGKVFWQNLAGYKRQEALRPYLSSEEDRKKGKKFARYQLGDLLLHLEKKHGEDWGKVYDEAWERIDKKVEGLSKHIKLEEERRSEDAQSKAALTDWLRAKASFVIEGLKEADKDEFCRCELKLQPWYGDLRGKPFAIEAENSILDISGFSKQYNCAFIWQKDGVKKLNLYLIINYFKGGKLRFKKIKPEAFEANRFYTVINKKSGEIVPMEVNFNFDDPNLIILPLAFGKRQGREFIWNDLLSLETGSLKLANGRVIEKTLYNRRTRQDEPALFVALTFERREVLDSSNIKPMNLIGVDRGENIPAVIALTDPEGCPLSRFKDSLGNPTHILRIGESYKEKQRTIQAKKEVEQRRAGGYSRKYASKAKNLADDMVRNTARDLLYYAVTQDAMLIFENLSRGFGRQGKRTFMAERQYTRMEDWLTAKLAYEGLPSKTYLSKTLAQYTSKTCSNCGFTITSADYDRVLEKLKKTATGWMTTINGKELKVEGQITYYNRYKRQNVVKDLSVELDRLSEESVNNDISSWTKGRSGEALSLLKKRFSHRPVQEKFVCLNCGFETHADEQAALNIARSWLFLRSQEYKKYQTNKTTGNTDKRAFVETWQSFYRKKLKEVWKPAV

SEQ ID NO: 40136 - protein, 978 aa, Artificial Sequence; identical to SEQ ID NO: 40048
  CasX variant

SEQ ID NO: 40137 - protein, 978 aa, Artificial Sequence
  CasX variant
QEIKRINKIRRRLVKDSNTKKAGKTGPMKTLLVRVMTPDLRERLENLRKKPENIPQPISNTSRANLNKLLTDYTEMKKAILHVYWEEFQKDPVGLMSRVAQPASKKIDQNKLKPEMDEKGNLTTAGFACSQCGQPLFVYKLEQVSEKGKAYTNYFGRCNVAEHEKLILLAQLKPEKDSDEAVTYSLGKFGQRALDFYSIHVTKESTHPVKPLAQIAGNRYASGPVGKALSDACMGTIASFLSKYQDIIIEHQKVVKGNQKRLESLRELAGKENLEYPSVTLPPQPHTKEGVDAYNEVIARVRMWVNLNLWQKLKLSRDDAKPLLRLKGFPSFPLVERQANEVDWWDMVCNVKKLINEKKEDGKVFWQNLAGYKRQEALRPYLSSEEDRKKGKKFARYQLGDLLLHLEKKHGEDWGKVYDEAWERIDKKVEGLSKHIKLEEERRSEDAQSKAALTDWLRAKASFVIEGLKEADKDEFCRCELKLQKWYGDLRGKPFAIEAENSILDISGFSKQYNCAFIWQKDGVKKLNLYLIINYFKGGKLRFKKIKPEAFEANRFYTVINKKSGEIVPMEVNFNFDDPNLIILPLAFGKRFGREFIWNDLLSLETGSLKLANGRVIEKTLYNRRTRQDEPALFVALTFERREVLDSSNIKPMNLIGVDRGENIPAVIALTDPEGCPLSRFKDSLGNPTHILRIGESYKEKQRTIQAKKEVEQRRAGGYSRKYASKAKNLADDMVRNTARDLLYYAVTQDAMLIFENLSRGFGRQGKRTFMAERQYTRMEDWLTAKLAYEGLPSKTYLSKTLAQYTSKTCSNCGFTITSADYDRVLEKLKKTATGWMTTINGKELKVEGQITYYNRYKRQNVVKDLSVELDRLSEESVNNDISSWTKGRSGEALSLLKKRFSHRPVQEKFVCLNCGFETHADEQAALNIARSWLFLRSQEYKKYQTNKTTGNTDKRAFVETWQSFYRKKLKEVWKPAV

SEQ ID NO: 40138 - protein, 978 aa, Artificial Sequence
  CasX variant
QEIKRINKIRRRLVKDSNTKKAGKTGPMKTLLVRVMTPDLRERLENLRKKPENIPQPISNTSRANLNKLLTDYTEMKKAILHVYWEEFQKDPVGLMSRVAQPASKKIDQNKLKPEMDEKGNLTTAGFACSQCGQPLFVYKLEQVSEKGKAYTNYFGRCNVAEHEKLILLAQLKPEKDSDEAVTYSLGKFGQRALDFYSIHVTKESTHPVKPLAQIAGNRYASGPVGKALSDACMGTIASFLSKYQDIIIEHQKVVKGNQKRLESLRELAGKENLEYPSVTLPPQPHTKEGVDAYNEVIARVRMWVNLNLWQKLKLSRDDAKPLLRLKGFPSFPLVERQANEVDWWDMVCNVKKLINEKKEDGKVFWQNLAGYKRQEALRPYLSSEEDRKKGKKFARYQLGDLLLHLEKKHGEDWGKVYDEAWERIDKKVEGLSKHIKLEEERRSEDAQSKAALTDWLRAKASFVIEGLKEADKDEFCRCELKLQKWYGDLRGKPFAIEAENSILDISGFSKQYNCAFIWQKDGVKKLNLYLIINYFKGGKLRFKKIKPEAFEANRFYTVINKKSGEIVPMEVNFNFDDPNLIILPLAFGKRVGREFIWNDLLSLETGSLKLANGRVIEKTLYNRRTRQDEPALFVALTFERREVLDSSNIKPMNLIGVDRGENIPAVIALTDPEGCPLSRFKDSLGNPTHILRIGESYKEKQRTIQAKKEVEQRRAGGYSRKYASKAKNLADDMVRNTARDLLYYAVTQDAMLIFENLSRGFGRQGKRTFMAERQYTRMEDWLTAKLAYEGLPSKTYLSKTLAQYTSKTCSNCGFTITSADYDRVLEKLKKTATGWMTTINGKELKVEGQITYYNRYKRQNVVKDLSVELDRLSEESVNNDISSWTKGRSGEALSLLKKRFSHRPVQEKFVCLNCGFETHADEQAALNIARSWLFLRSQEYKKYQTNKTTGNTDKRAFVETWQSFYRKKLKEVWKPAV

SEQ ID NO: 40139 - protein, 979 aa, Artificial Sequence
  CasX variant
QEIKRINKIRRRLVKDSNTKKAGKTGPMKTLLVRVMTPDLRERLENLRKKPENIPQPISNTSRANLNKLLTDYTEMKKAILHVYWEEFQKDPVGLMSRVAQPASKKIDQNKLKPEMDEKGNLTTAGFACSQCGQPLFVYKLEQVSEKGKAYTNYFGRCNVAEHEKLILLAQLKPEKDSDEAVTYSLGKFGQRALDFYSIHVTKESTHPVKPLAQIAGNRYASGPVGKALSDACMGTIASFLSKYQDIIIEHQKVVKGNQKRLESLRELAGKENLEYPSVTLPPQPHTKEGVDAYNEVIARVRMWVNLNLWQKLKLSRDDAKPLLRLKGFPSFPLVERQANEVDWWDMVCNVKKLINEKKEDGKVFWQNLAGYKRQEALRPYLSSEEDRKKGKKFARYQLGDLLLHLEKKHGEDWGKVYDEAWERIDKKVEGLSKHIKLEEERRSEDAQSKAALTDWLRAKASFVIEGLKEADKDEFCRCELKLQKWYGDLRGKPFAIEAENSILDISGFSKQYNCAFIWQKDGVKKLNLYLIINYFKGGKLRFKKIKPEAFEANRFYTVINKKSGEIVPMEVNFNFDDPNLIILPLAFGKRQGREFIWNDLLSLETGSLKLANGRVIEKTLYNRRTRQDEPALFVALTFERREVLDSSNIIKPMNLIGVDRGENIPAVIALTDPEGCPLSRFKDSLGNPTHILRIGESYKEKQRTIQAKKEVEQRRAGGYSRKYASKAKNLADDMVRNTARDLLYYAVTQDAMLIFENLSRGFGRQGKRTFMAERQYTRMEDWLTAKLAYEGLPSKTYLSKTLAQYTSKTCSNCGFTITSADYDRVLEKLKKTATGWMTTINGKELKVEGQITYYNRYKRQNVVKDLSVELDRLSEESVNNDISSWTKGRSGEALSLLKKRFSHRPVQEKFVCLNCGFETHADEQAALNIARSWLFLRSQEYKKYQTNKTTGNTDKRAFVETWQSFYRKKLKEVWKPAV

SEQ ID NO: 40140 - protein, 979 aa, Artificial Sequence
  CasX variant
QEIKRINKIRRRLVKDSNTKKAGKTGPMKTLLVRVMTPDLRERLENLRKKPENIPQPISNTSRANLNKLLTDYTEMKKAILHVYWEEFQKDPVGLMSRVAQPASKKIDQNKLKPEMDEKGNLTTAGFACSQCGQPLFVYKLEQVSEKGKAYTNYFGRCNVAEHEKLILLAQLKPEKDSDEAVTYSLGKFGQRALDFYSIHVTKESTHPVKPLAQIAGNRYASGPVGKALSDACMGTIASFLSKYQDIIIEHQKVVKGNQKRLESLRELAGKENLEYPSVTLPPQPHTKEGVDAYNEVIARVRMWVNLNLWQKLKLSRDDAKPLLRLKGFPSFPLVERQANEVDWWDMVCNVKKLINEKKEDGKVFWQNLAGYKRQEALRPYLSSEEDRKKGKKFARYQLGDLLLHLEKKHGEDWGKVYDEAWERIDKKVEGLSKHIKLEEERRSEDAQSKAALTDWLRAKASFVIEGLKEADKDEFCRCELKLQKWYGDLRGKPFAIEAENSILDISGFSKQYNCAFIWQKDGVKKLNLYLIINYFKGGKLRFKKIKPEAFEANRFYTVINKKSGEIVPMEVNFNFDDPNLIILPLAFGKRQGREFIWNDLLSLETGSLKLANGRVIEKTLYNRRTRQDEPALFVALTFERREVLDSSNIKTPMNLIGVDRGENIPAVIALTDPEGCPLSRFKDSLGNPTHILRIGESYKEKQRTIQAKKEVEQRRAGGYSRKYASKAKNLADDMVRNTARDLLYYAVTQDAMLIFENLSRGFGRQGKRTFMAERQYTRMEDWLTAKLAYEGLPSKTYLSKTLAQYTSKTCSNCGFTITSADYDRVLEKLKKTATGWMTTINGKELKVEGQITYYNRYKRQNVVKDLSVELDRLSEESVNNDISSWTKGRSGEALSLLKKRFSHRPVQEKFVCLNCGFETHADEQAALNIARSWLFLRSQEYKKYQTNKTTGNTDKRAFVETWQSFYRKKLKEVWKPAV

SEQ ID NO: 40141 - protein, 979 aa, Artificial Sequence
  CasX variant
QEIKRINKIRRRLVKDSNTKKAGKTGPMKTLLVRVMTPDLRERLENLRKKPENIPQPISNTSRANLNKLLTDYTEMKKAILHVYWEEFQKDPVGLMSRVAQPASKKIDQNKLKPEMDEKGNLTTAGFACSQCGQPLFVYKLEQVSEKGKAYTNYFGRCNVAEHEKLILLAQLKPEKDSDEAVTYSLGKFGQRALDFYSIHVTKESTHPVKPLAQIAGNRYASGPVGKALSDACMGTIASFLSKYQDIIIEHQKVVKGNQKRLESLRELAGKENLEYPSVTLPPQPHTKEGVDAYNEVIARVRMWVNLNLWQKLKLSRDDAKPLLRLKGFPSFPLVERQANEVDWWDMVCNVKKLINEKKEDGKVFWQNLAGYKRQEALRPYLSSEEDRKKGKKFARYQLGDLLLHLEKKHGEDWGKVYDEAWERIDKKVEGLSKHIKLEEERRSEDAQSKAALTDWLRAKASFVIEGLKEADKDEFCRCELKLQKWYGDLRGKPFAIEAENSILDISGFSKQYNCAFIWQKDGVKKLNLYLIINYFKGGKLRFKKIKPEAFEANRFYTVINKKSGEIVPMEVNFNFDDPNLIILPLAFGKRQGREFIWNDLLSLETGSLKLANGRVIEKTLYNRRTRQDEPALFVALTFERREVLDSSNIKNPMNLIGVDRGENIPAVIALTDPEGCPLSRFKDSLGNPTHILRIGESYKEKQRTIQAKKEVEQRRAGGYSRKYASKAKNLADDMVRNTARDLLYYAVTQDAMLIFENLSRGFGRQGKRTFMAERQYTRMEDWLTAKLAYEGLPSKTYLSKTLAQYTSKTCSNCGFTITSADYDRVLEKLKKTATGWMTTINGKELKVEGQITYYNRYKRQNVVKDLSVELDRLSEESVNNDISSWTKGRSGEALSLLKKRFSHRPVQEKFVCLNCGFETHADEQAALNIARSWLFLRSQEYKKYQTNKTTGNTDKRAFVETWQSFYRKKLKEVWKPAV

SEQ ID NO: 40142 - protein, 979 aa, Artificial Sequence
  CasX variant
QEIKRINKIRRRLVKDSNTKKAGKTGPMKTLLVRVMTPDLRERLENLRKKPENIPQPISNTSRANLNKLLTDYTEMKKAILHVYWEEFQKDPVGLMSRVAQPASKKIDQNKLKPEMDEKGNLTTAGFACSQCGQPLFVYKLEQVSEKGKAYTNYFGRCNVAEHEKLILLAQLKPEKDSDEAVTYSLGKFGQRALDFYSIHVTKESTHPVKPLAQIAGNRYASGPVGKALSDACMGTIASFLSKYQDIIIEHQKVVKGNQKRLESLRELAGKENLEYPSVTLPPQPHTKEGVDAYNEVIARVRMWVNLNLWQKLKLSRDDAKPLLRLKGFPSFPLVERQANEVDWWDMVCNVKKLINEKKEDGKVFWQNLAGYKRQEALRPYLSSEEDRKKGKKFARYQLGDLLLHLEKKHGEDWGKVYDEAWERIDKKVEGLSKHIKLEEERRSEDAQSKAALTDWLRAKASFVIEGLKEADKDEFCRCELKLQKWYGDLRGKPFAIEAENSILDISGFSKQYNCAFIWQKDGVKKLNLYLIINYFKGGKLRFKKIKPEAFEANRFYTVINKKSGEIVPMEVNFNFDDPNLIILPLAFGKRQGREFIWNDLLSLETGSLKLANGRVIEKTLYNRRTRQDEPALFVALTFERREVLDSSNIKPRMNLIGVDRGENIPAVIALTDPEGCPLSRFKDSLGNPTHILRIGESYKEKQRTIQAKKEVEQRRAGGYSRKYASKAKNLADDMVRNTARDLLYYAVTQDAMLIFENLSRGFGRQGKRTFMAERQYTRMEDWLTAKLAYEGLPSKTYLSKTLAQYTSKTCSNCGFTITSADYDRVLEKLKKTATGWMTTINGKELKVEGQITYYNRYKRQNVVKDLSVELDRLSEESVNNDISSWTKGRSGEALSLLKKRFSHRPVQEKFVCLNCGFETHADEQAALNIARSWLFLRSQEYKKYQTNKTTGNTDKRAFVETWQSFYRKKLKEVWKPAV

SEQ ID NO: 40143 - protein, 979 aa, Artificial Sequence
  CasX variant
QEIKRINKIRRRLVKDSNTKKAGKTGPMKTLLVRVMTPDLRERLENLRKKPENIPQPISNTSRANLNKLLTDYTEMKKAILHVYWEEFQKDPVGLMSRVAQPASKKIDQNKLKPEMDEKGNLTTAGFACSQCGQPLFVYKLEQVSEKGKAYTNYFGRCNVAEHEKLILLAQLKPEKDSDEAVTYSLGKFGQRALDFYSIHVTKESTHPVKPLAQIAGNRYASGPVGKALSDACMGTIASFLSKYQDIIIEHQKVVKGNQKRLESLRELAGKENLEYPSVTLPPQPHTKEGVDAYNEVIARVRMWVNLNLWQKLKLSRDDAKPLLRLKGFPSFPLVERQANEVDWWDMVCNVKKLINEKKEDGKVFWQNLAGYKRQEALRPYLSSEEDRKKGKKFARYQLGDLLLHLEKKHGEDWGKVYDEAWERIDKKVEGLSKHIKLEEERRSEDAQSKAALTDWLRAKASFVIEGLKEADKDEFCRCELKLQKWYGDLRGKPFAIEAENSILDISGFSKQYNCAFIWQKDGVKKLNLYLIINYFKGGKLRFKKIKPEAFEANRFYTVINKKSGEIVPMEVNFNFDDPNLIILPLAFGKRQGREFIWNDLLSLETGSLKLANGRVIEKTLYNRRTRQDEPALFVALTFERREVLDSSNIKPMSNLIGVDRGENIPAVIALTDPEGCPLSRFKDSLGNPTHILRIGESYKEKQRTIQAKKEVEQRRAGGYSRKYASKAKNLADDMVRNTARDLLYYAVTQDAMLIFENLSRGFGRQGKRTFMAERQYTRMEDWLTAKLAYEGLPSKTYLSKTLAQYTSKTCSNCGFTITSADYDRVLEKLKKTATGWMTTINGKELKVEGQITYYNRYKRQNVVKDLSVELDRLSEESVNNDISSWTKGRSGEALSLLKKRFSHRPVQEKFVCLNCGFETHADEQAALNIARSWLFLRSQEYKKYQTNKTTGNTDKRAFVETWQSFYRKKLKEVWKPAV

SEQ ID NO: 40144 - protein, 978 aa, Artificial Sequence
  CasX variant
QEIKRINKIRRRLVKDSNTKKAGKTGPMKTLLVRVMTPDLRERLENLRKKPENIPQPISNTSRANLNKLLTDYTEMKKAILHVYWEEFQKDPVGLMSRVAQPASKKIDQNKLKPEMDEKGNLTTAGFACSQCGQPLFVYKLEQVSEKGKAYTNYFGRCNVAEHEKLILLAQLKPEKDSDEAVTYSLGKFGQRALDFYSIHVTKESTHPVKPLAQIAGNRYASGPVGKALSDACMGTIASFLSKYQDIIIEHQKVVKGNQKRLESLRELAGKENLEYPSVTLPPQPHTKEGVDAYNEVIARVRMWVNLNLWQKLKLSRDDAKPLLRLKGFPSFPLVERQANEVDWWDMVCNVKKLINEKKEDGKVFWQNLAGYKRQEALRPYLSSEEDRKKGKKFARYQLGDLLLHLEKKHGEDWGKVYDEAWERIDKKVEGLSKHIKLEEERRSEDAQSKAALTDWLRAKASFVIEGLKEADKDEFCRCELKLQKWYGDLRGKPFAIEAENSILDISGFSKQYNCAFIWQKDGVKKLNLYLIINYFKGGKLRFKKIKPEAFEANRFYTVINKKSGEIVPMEVNFNFDDPNLIILPLAFGKRQGREFIWNDLLSLETGSLKLANGRVIEKTLYNRRTRQDEPALFVALTFERREVLDSSNIKPMNLIGVDRGENIPAVIALTDPEGCPLSRFKDSLGNPTHILRIWESYKEKQRTIQAKKEVEQRRAGGYSRKYASKAKNLADDMVRNTARDLLYYAVTQDAMLIFENLSRGFGRQGKRTFMAERQYTRMEDWLTAKLAYEGLPSKTYLSKTLAQYTSKTCSNCGFTITSADYDRVLEKLKKTATGWMTTINGKELKVEGQITYYNRYKRQNVVKDLSVELDRLSEESVNNDISSWTKGRSGEALSLLKKRFSHRPVQEKFVCLNCGFETHADEQAALNIARSWLFLRSQEYKKYQTNKTTGNTDKRAFVETWQSFYRKKLKEVWKPAV

SEQ ID NO: 40145 - protein, 978 aa, Artificial Sequence
  CasX variant
QEIKRINKIRRRLVKDSNTKKAGKTGPMKTLLVRVMTPDLRERLENLRKKPENIPQPISNTSRANLNKLLTDYTEMKKAILHVYWEEFQKDPVGLMSRVAQPASKKIDQNKLKPEMDEKGNLTTAGFACSQCGQPLFVYKLEQVSEKGKAYTNYFGRCNVAEHEKLILLAQLKPEKDSDEAVTYSLGKFGQRALDFYSIHVTKESTHPVKPLAQIAGNRYASGPVGKALSDACMGTIASFLSKYQDIIIEHQKVVKGNQKRLESLRELAGKENLEYPSVTLPPQPHTKEGVDAYNEVIARVRMWVNLNLWQKLKLSRDDAKPLLRLKGFPSFPLVERQANEVDWWDMVCNVKKLINEKKEDGKVFWQNLAGYKRQEALRPYLSSEEDRKKGKKFARYQLGDLLLHLEKKHGEDWGKVYDEAWERIDKKVEGLSKHIKLEEERRSEDAQSKAALTDWLRAKASFVIEGLKEADKDEFCRCELKLQKWYGDLRGKPFAIEAENSILDISGFSKQYNCAFIWQKDGVKKLNLYLIINYFKGGKLRFKKIKPEAFEANRFYTVINKKSGEIVPMEVNFNFDDPNLIILPLAFGKRQGREFIWNDLLSLETGSLKLANGRVIEKTLYNRRTRQDEPALFVALTFERREVLDSSNIKPMNLIGVDRGENIPAVIALTDPEGCPLSRFKDSLGNPTHILRIRESYKEKQRTIQAKKEVEQRRAGGYSRKYASKAKNLADDMVRNTARDLLYYAVTQDAMLIFENLSRGFGRQGKRTFMAERQYTRMEDWLTAKLAYEGLPSKTYLSKTLAQYTSKTCSNCGFTITSADYDRVLEKLKKTATGWMTTINGKELKVEGQITYYNRYKRQNVVKDLSVELDRLSEESVNNDISSWTKGRSGEALSLLKKRFSHRPVQEKFVCLNCGFETHADEQAALNIARSWLFLRSQEYKKYQTNKTTGNTDKRAFVETWQSFYRKKLKEVWKPAV

SEQ ID NO: 40146 - protein, 978 aa, Artificial Sequence
  CasX variant
QEIKRINKIRRRLVKDSNTKKAGKTGPMKTLLVRVMTPDLRERLENLRKKPENIPQPISNTSRANLNKLLTDYTEMKKAILHVYWEEFQKDPVGLMSRVAQPASKKIDQNKLKPEMDEKGNLTTAGFACSQCGQPLFVYKLEQVSEKGKAYTNYFGRCNVAEHEKLILLAQLKPEKDSDEAVTYSLGKFGQRALDFYSIHVTKESTHPVKPLAQIAGNRYASGPVGKALSDACMGTIASFLSKYQDIIIEHQKVVKGNQKRLESLRELAGKENLEYPSVTLPPQPHTKEGVDAYNEVIARVRMWVNLNLWQKLKLSRDDAKPLLRLKGFPSFPLVERQANEVDWWDMVCNVKKLINEKKEDGKVFWQNLAGYKRQEALRPYLSSEEDRKKGKKFARYQLGDLLLHLEKKHGEDWGKVYDEAWERIDKKVEGLSKHIKLEEERRSEDAQSKAALTDWLRAKASFVIEGLKEADKDEFCRCELKLQKWYGDLRGKPFAIEAENSILDISGFSKQYNCAFIWQKDGVKKLNLYLIINYFKGGKLRFKKIKPEAFEANRFYTVINKKSGEIVPMEVNFNFDDPNLIILPLAFGKRQGREFIWNDLLSLETGSLKLANGRVIEKTLYNRRTRQDEPALFVALTFERREVLDSSNIKPMNLIGVDRGENIPAVIALTDPEGCPLSRFKDSLGNPTHILRIGESYKEKQRTIQASKEVEQRRAGGYSRKYASKAKNLADDMVRNTARDLLYYAVTQDAMLIFENLSRGFGRQGKRTFMAERQYTRMEDWLTAKLAYEGLPSKTYLSKTLAQYTSKTCSNCGFTITSADYDRVLEKLKKTATGWMTTINGKELKVEGQITYYNRYKRQNVVKDLSVELDRLSEESVNNDISSWTKGRSGEALSLLKKRFSHRPVQEKFVCLNCGFETHADEQAALNIARSWLFLRSQEYKKYQTNKTTGNTDKRAFVETWQSFYRKKLKEVWKPAV

SEQ ID NO: 40147 - protein, 978 aa, Artificial Sequence
  CasX variant
QEIKRINKIRRRLVKDSNTKKAGKTGPMKTLLVRVMTPDLRERLENLRKKPENIPQPISNTSRANLNKLLTDYTEMKKAILHVYWEEFQKDPVGLMSRVAQPASKKIDQNKLKPEMDEKGNLTTAGFACSQCGQPLFVYKLEQVSEKGKAYTNYFGRCNVAEHEKLILLAQLKPEKDSDEAVTYSLGKFGQRALDFYSIHVTKESTHPVKPLAQIAGNRYASGPVGKALSDACMGTIASFLSKYQDIIIEHQKVVKGNQKRLESLRELAGKENLEYPSVTLPPQPHTKEGVDAYNEVIARVRMWVNLNLWQKLKLSRDDAKPLLRLKGFPSFPLVERQANEVDWWDMVCNVKKLINEKKEDGKVFWQNLAGYKRQEALRPYLSSEEDRKKGKKFARYQLGDLLLHLEKKHGEDWGKVYDEAWERIDKKVEGLSKHIKLEEERRSEDAQSKAALTDWLRAKASFVIEGLKEADKDEFCRCELKLQKWYGDLRGKPFAIEAENSILDISGFSKQYNCAFIWQKDGVKKLNLYLIINYFKGGKLRFKKIKPEAFEANRFYTVINKKSGEIVPMEVNFNFDDPNLIILPLAFGKRQGREFIWNDLLSLETGSLKLANGRVIEKTLYNRRTRQDEPALFVALTFERREVLDSSNIKPMNLIGVDRGENIPAVIALTDPEGCPLSRFKDSLGNPTHILRIGESYKEKQRTIQAKKEVEQRRAGGYSRKYASKAKNLADDMVHNTARDLLYYAVTQDAMLIFENLSRGFGRQGKRTFMAERQYTRMEDWLTAKLAYEGLPSKTYLSKTLAQYTSKTCSNCGFTITSADYDRVLEKLKKTATGWMTTINGKELKVEGQITYYNRYKRQNVVKDLSVELDRLSEESVNNDISSWTKGRSGEALSLLKKRFSHRPVQEKFVCLNCGFETHADEQAALNIARSWLFLRSQEYKKYQTNKTTGNTDKRAFVETWQSFYRKKLKEVWKPAV

SEQ ID NO: 40148 - protein, 978 aa, Artificial Sequence
  CasX variant
QEIKRINKIRRRLVKDSNTKKAGKTGPMKTLLVRVMTPDLRERLENLRKKPENIPQPISNTSRANLNKLLTDYTEMKKAILHVYWEEFQKDPVGLMSRVAQPASKKIDQNKLKPEMDEKGNLTTAGFACSQCGQPLFVYKLEQVSEKGKAYTNYFGRCNVAEHEKLILLAQLKPEKDSDEAVTYSLGKFGQRALDFYSIHVTKESTHPVKPLAQIAGNRYASGPVGKALSDACMGTIASFLSKYQDIIIEHQKVVKGNQKRLESLRELAGKENLEYPSVTLPPQPHTKEGVDAYNEVIARVRMWVNLNLWQKLKLSRDDAKPLLRLKGFPSFPLVERQANEVDWWDMVCNVKKLINEKKEDGKVFWQNLAGYKRQEALRPYLSSEEDRKKGKKFARYQLGDLLLHLEKKHGEDWGKVYDEAWERIDKKVEGLSKHIKLEEERRSEDAQSKAALTDWLRAKASFVIEGLKEADKDEFCRCELKLQKWYGDLRGKPFAIEAENSILDISGFSKQYNCAFIWQKDGVKKLNLYLIINYFKGGKLRFKKIKPEAFEANRFYTVINKKSGEIVPMEVNFNFDDPNLIILPLAFGKRQGREFIWNDLLSLETGSLKLANGRVIEKTLYNRRTRQDEPALFVALTFERREVLDSSNIKPMNLIGVDRGENIPAVIALTDPEGCPLSRFKDSLGNPTHILRIGESYKEKQRTIQAKKEVEQRRAGGYSRKYASKAKNLADDMVRNTARDLLYYAVTQDAMLIFENLSRGFGRQGKRTFSAERQYTRMEDWLTAKLAYEGLPSKTYLSKTLAQYTSKTCSNCGFTITSADYDRVLEKLKKTATGWMTTINGKELKVEGQITYYNRYKRQNVVKDLSVELDRLSEESVNNDISSWTKGRSGEALSLLKKRFSHRPVQEKFVCLNCGFETHADEQAALNIARSWLFLRSQEYKKYQTNKTTGNTDKRAFVETWQSFYRKKLKEVWKPAV

SEQ ID NO: 40149 - protein, 978 aa, Artificial Sequence
  CasX variant
QEIKRINKIRRRLVKDSNTKKAGKTGPMKTLLVRVMTPDLRERLENLRKKPENIPQPISNTSRANLNKLLTDYTEMKKAILHVYWEEFQKDPVGLMSRVAQPASKKIDQNKLKPEMDEKGNLTTAGFACSQCGQPLFVYKLEQVSEKGKAYTNYFGRCNVAEHEKLILLAQLKPEKDSDEAVTYSLGKFGQRALDFYSIHVTKESTHPVKPLAQIAGNRYASGPVGKALSDACMGTIASFLSKYQDIIIEHQKVVKGNQKRLESLRELAGKENLEYPSVTLPPQPHTKEGVDAYNEVIARVRMWVNLNLWQKLKLSRDDAKPLLRLKGFPSFPLVERQANEVDWWDMVCNVKKLINEKKEDGKVFWQNLAGYKRQEALRPYLSSEEDRKKGKKFARYQLGDLLLHLEKKHGEDWGKVYDEAWERIDKKVEGLSKHIKLEEERRSEDAQSKAALTDWLRAKASFVIEGLKEADKDEFCRCELKLQKWYGDLRGKPFAIEAENSILDISGFSKQYNCAFIWQKDGVKKLNLYLIINYFKGGKLRFKKIKPEAFEANRFYTVINKKSGEIVPMEVNFNFDDPNLIILPLAFGKRQGREFIWNDLLSLETGSLKLANGRVIEKTLYNRRTRQDEPALFVALTFERREVLDSSNIKPMNLIGVDRGENIPAVIALTDPEGCPLSRFKDSLGNPTHILRIGESYKEKQRTIQAKKEVEQRRAGGYSRKYASKAKNLADDMVRNTARDLLYYAVTQDAMLIFENLSRGFGRQGKRTFAAERQYTRMEDWLTAKLAYEGLPSKTYLSKTLAQYTSKTCSNCGFTITSADYDRVLEKLKKTATGWMTTINGKELKVEGQITYYNRYKRQNVVKDLSVELDRLSEESVNNDISSWTKGRSGEALSLLKKRFSHRPVQEKFVCLNCGFETHADEQAALNIARSWLFLRSQEYKKYQTNKTTGNTDKRAFVETWQSFYRKKLKEVWKPAV

SEQ ID NO: 40150 - protein, 978 aa, Artificial Sequence
  CasX variant
QEIKRINKIRRRLVKDSNTKKAGKTGPMKTLLVRVMTPDLRERLENLRKKPENIPQPISNTSRANLNKLLTDYTEMKKAILHVYWEEFQKDPVGLMSRVAQPASKKIDQNKLKPEMDEKGNLTTAGFACSQCGQPLFVYKLEQVSEKGKAYTNYFGRCNVAEHEKLILLAQLKPEKDSDEAVTYSLGKFGQRALDFYSIHVTKESTHPVKPLAQIAGNRYASGPVGKALSDACMGTIASFLSKYQDIIIEHQKVVKGNQKRLESLRELAGKENLEYPSVTLPPQPHTKEGVDAYNEVIARVRMWVNLNLWQKLKLSRDDAKPLLRLKGFPSFPLVERQANEVDWWDMVCNVKKLINEKKEDGKVFWQNLAGYKRQEALRPYLSSEEDRKKGKKFARYQLGDLLLHLEKKHGEDWGKVYDEAWERIDKKVEGLSKHIKLEEERRSEDAQSKAALTDWLRAKASFVIEGLKEADKDEFCRCELKLQKWYGDLRGKPFAIEAENSILDISGFSKQYNCAFIWQKDGVKKLNLYLIINYFKGGKLRFKKIKPEAFEANRFYTVINKKSGEIVPMEVNFNFDDPNLIILPLAFGKRQGREFIWNDLLSLETGSLKLANGRVIEKTLYNRRTRQDEPALFVALTFERREVLDSSNIKPMNLIGVDRGENIPAVIALTDPEGCPLSRFKDSLGNPTHILRIGESYKEKQRTIQAKKEVEQRRAGGYSRKYASKAKNLADDMVRNTARDLLYYAVTQDAMLIFENLSRGFGRQGKRTFMAERQYTRMEDWLTAKLAYEGLPSKTYLSKTLAQYTSKTCSNCGFTITSADYDRVLEKLKKTATGWMTTINGKELKVEGQITYYNRYKRQNVVKDLSVELDRLSEESVNNDISSWDKGRSGEALSLLKKRFSHRPVQEKFVCLNCGFETHADEQAALNIARSWLFLRSQEYKKYQTNKTTGNTDKRAFVETWQSFYRKKLKEVWKPAV

SEQ ID NO: 40151 - protein, 979 aa, Artificial Sequence
  CasX variant
QEIKRINKIRRRLVKDSNTKKAGKTGPMKTLLVRVMTPDLRERLENLRKKPENIPQPISNTSRANLNKLLTDYTEMKKAILHVYWEEFQKDPVGLMSRVAQPASKKIDQNKLKPEMDEKGNLTTAGFACSQCGQPLFVYKLEQVSEKGKAYTNYFGRCNVAEHEKLILLAQLKPEKDSDEAVTYSLGKFGQRALDFYSIHVTKESTHPVKPLAQIAGNRYASGPVGKALSDACMGTIASFLSKYQDIIIEHQKVVKGNQKRLESLRELAGKENLEYPSVTLPPQPHTKEGVDAYNEVIARVRMWVNLNLWQKLKLSRDDAKPLLRLKGFPSFPLVERQANEVDWWDMVCNVKKLINEKKEDGKVFWQNLAGYKRQEALRPYLSSEEDRKKGKKFARYQLGDLLLHLEKKHGEDWGKVYDEAWERIDKKVEGLSKHIKLEEERRSEDAQSKAALTDWLRAKASFVIEGLKEADKDEFCRCELKLQKWYGDLRGKPFAIEAENSILDISGFSKQYNCAFIWQKDGVKKLNLYLIINYFKGGKLRFKKIKPEAFEANRFYTVINKKSGEIVPMEVNFNFDDPNLIILPLAFGKRQGREFIWNDLLSLETGSLKLANGRVIEKTLYNRRTRQDEPALFVALTFERREVLDSSNIKPMNLIGVDRGENIPAVIALTDPEGCPLSRFKDSLGNPTHILRIGESYKEKQRTIQAKKEVEQRRAGGYSRKYASKAKNLADDMVRNTARDLLYYAVTQDAMLIFENLSRGFGRQGKRTFMAERQYTRMEDWLTAKLAYEGLPSKTYLSKTLAQYTSKTCSNCGFTITSADYDRVLEKLKKTATGWMTTINGKELKVEGQITYYNRYKRQNVVKDLSVELDRLSEESVNNDISSWTKGRSGNEALSLLKKRFSHRPVQEKFVCLNCGFETHADEQAALNIARSWLFLRSQEYKKYQTNKTTGNTDKRAFVETWQSFYRKKLKEVWKPAV

SEQ ID NO: 40152 - protein, 978 aa, Artificial Sequence
  CasX variant
QEIKRINKIRRRLVKDSNTKKAGKTGPMKTLLVRVMTPDLRERLENLRKKPENIPQPISNTSRANLNKLLTDYTEMKKAILHVYWEEFQKDPVGLMSRVAQPASKKIDQNKLKPEMDEKGNLTTAGFACSQCGQPLFVYKLEQVSEKGKAYTNYFGRCNVAEHEKLILLAQLKPEKDSDEAVTYSLGKFGQRALDFYSIHVTKESTHPVKPLAQIAGNRYASGPVGKALSDACMGTIASFLSKYQDIIIEHQKVVKGNQKRLESLRELAGKENLEYPSVTLPPQPHTKEGVDAYNEVIARVRMWVNLNLWQKLKLSRDDAKPLLRLKGFPSFPLVERQANEVDWWDMVCNVKKLINEKKEDGKVFWQNLAGYKRQEALRPYLSSEEDRKKGKKFARYQLGDLLLHLEKKHGEDWGKVYDEAWERIDKKVEGLSKHIKLEEERRSEDAQSKAALTDWLRAKASFVIEGLKEADKDEFCRCELKLQKWYGDLRGKPFAIEAENSILDISGFSKQYNCAFIWQKDGVKKLNLYLIINYFKGGKLRFKKIKPEAFEANRFYTVINKKSGEIVPMEVNFNFDDPNLIILPLAFGKRQGREFIWNDLLSLETGSLKLANGRVIEKTLYNRRTRQDEPALFVALTFERREVLDSSNIKPMNLIGVDRGENIPAVIALTDPEGCPLSRFKDSLGNPTHILRIGESYKEKQRTIQAKKEVEQRRAGGYSRKYASKAKNLADDMVRNTARDLLYYAVTQDAMLIFENLSRGFGRQGKRTFMAERQYTRMEDWLTAKLAYEGLPSKTYLSKTLAQYTSKTCSNCGFTITSADYDRVLEKLKKTATGWMTTINGKELKVEGQITYYNRYKRQNVVKDLSVELDRLSEESVNNDISSWTKGRSGEALSLLKKRFSHRPVQEKFVCLNCGFETHADEQAALNIARVWLFLRSQEYKKYQTNKTTGNTDKRAFVETWQSFYRKKLKEVWKPAV

SEQ ID NO: 40153 - protein, 978 aa, Artificial Sequence
  CasX variant
QEIKRINKIRRRLVKDSNTKKAGKTGPMKTLLVRVMTPDLRERLENLRKKPENIPQPISNTSRANLNKLLTDYTEMKKAILHVYWEEFQKDPVGLMSRVAQPASKKIDQNKLKPEMDEKGNLTTAGFACSQCGQPLFVYKLEQVSEKGKAYTNYFGRCNVAEHEKLILLAQLKPEKDSDEAVTYSLGKFGQRALDFYSIHVTKESTHPVKPLAQIAGNRYASGPVGKALSDACMGTIASFLSKYQDIIIEHQKVVKGNQKRLESLRELAGKENLEYPSVTLPPQPHTKEGVDAYNEVIARVRMWVNLNLWQKLKLSRDDAKPLLRLKGFPSFPLVERQANEVDWWDMVCNVKKLINEKKEDGKVFWQNLAGYKRQEALRPYLSSEEDRKKGKKFARYQLGDLLLHLEKKHGEDWGKVYDEAWERIDKKVEGLSKHIKLEEERRSEDAQSKAALTDWLRAKASFVIEGLKEADKDEFCRCELKLQKWYGDLRGKPFAIEAENSILDISGFSKQYNCAFIWQKDGVKKLNLYLIINYFKGGKLRFKKIKPEAFEANRFYTVINKKSGEIVPMEVNFNFDDPNLIILPLAFGKRQGREFIWNDLLSLETGSLKLANGRVIEKTLYNRRTRQDEPALFVALTFERREVLDSSNIKPMNLIGVDRGENIPAVIALTDPEGCPLSRFKDSLGNPTHILRIGESYKEKQRTIQAKKEVEQRRAGGYSRKYASKAKNLADDMVRNTARDLLYYAVTQDAMLIFENLSRGFGRQGKRTFMAERQYTRMEDWLTAKLAYEGLPSKTYLSKTLAQYTSKTCSNCGFTITSADYDRVLEKLKKTATGWMTTINGKELKVEGQITYYNRYKRQNVVKDLSVELDRLSEESVNNDISSWTKGRSGEALSLLKKRFSHRPVQEKFVCLNCGFETHADEQAALNIARSWLFLRSQEYKKYQTNKTTINTDKRAFVETWQSFYRKKLKEVWKPAV

SEQ ID NO: 40154 - protein, 977 aa, Artificial Sequence
  CasX variant
QEIKRINKIRRRLVKDSNTKKAGKTGPMKTLLVRVMTPDLRERLENLRKKPENIPQPISNTSRANLNKLLTDYTEMKKAILHVYWEEFQKDPVGLMSRVAQPASKKIDQNKLKPEMDEKGNLTTAGFACSQCGQPLFVYKLEQVSEKGKAYTNYFGRCNVAEHEKLILLAQLKPEKDSDEAVTYSLGKFGQRALDFYSIHVTKESTHPVKPLAQIAGNRYASGPVGKALSDACMGTIASFLSKYQDIIIEHQKVVKGNQKRLESLRELAGKENLEYPSVTLPPQPHTKEGVDAYNEVIARVRMWVNLNLWQKLKLSRDDAKPLLRLKGFPSFPLVERQANEVDWWDMVCNVKKLINEKKEDGKVFWQNLAGYKRQEALRPYLSSPEDRKKGKKFARYQFGDLLLHLEKKHGEDWGKVYDEAWERIDKKVEGLSKHIKLEEERRSEDAQSKAALTDWLRAKASFVIEGLKEADKDEFCRCELKLQKWYGDLRGKPFAIEAENSILDISGFSKQYNCAFIWQKDGVKKLNLYLIINYFKGGKLRFKKIKPEAFEANRFYTVINKKSGEIVPMEVNFNFDDPNLIILPLAFGKRQGREFIWNDLLSLETGSLKLANGRVIEKTLYNRRTRQDEPALFVALTFERREVLDSSNIKPMNLIGVDRGENIPAVIALTDPEGCPLSRFKDSLGNPTHILRIGESYKEKQRTIQAKKEVEQRRAGGYSRKYASKAKNLANDMVRNTARDLLYYAVTQDAMLIFENLSRGFGRQGKRTFMAERQYTRMEDWLTAKLAYEGLSKTYLSKTLAQYTSKTCSNCGFTITSADYDRVLEKLKKTATGWMTTINGKELKVEGQITYYNRRKRQNVVKDLSVELDRLSEESVNNDISSWTKGRSGEALSLLKKRFSHRPVQEKFVCLNCGFETHADEQAALNIARSWLFLRSQEYKKYQTNKTTGNTDKRAFVETWQSFYRKKLKEVWKPAV

SEQ ID NO: 40155 - protein, 977 aa, Artificial Sequence
  CasX variant
QEIKRINKIRRRLVKDSNTKKAGKTGPMKTLLVRVMTPDLRERLENLRKKPENIPQPISNTSRANLNKLLTDYTEMKKAILHVYWEEFQKDPVGLMSRVAQPASKKIDQNKLKPEMDEKGNLTTAGFACSQCGQPLFVYKLEQVSEKGKAYTNYFGRCNVAEHEKLILLAQLKPEKDSDEAVTYSLGKFGQRALDFYSIHVTKESTHPVKPLAQIAGNRYASGPVGKALSDACMGTIASFLSKYQDIIIEHQKVVKGNQKRLESLRELAGKENLEYPSVTLPPQPHTKEGVDAYNEVIARVRMWVNLNLWQKLKLSRDDAKPLLRLKGFPSFPLVERQANEVDWWDMVCNVKKLINEKKEDGKVFWQNLAGYKRQEALRPYLSSEEDRKKGKKFARYQLGDLLLHLEKKHGEDWGKVYDEAWERIDKKVEGLSKHIKLEEERRSEDAQSKAALTDWLRAKASFVIEGLKEADKDEFSRCELKLQKWYGDLRGKPFAIEAENSILDISGFSKQYNCAFIWQKDGVKKLNLYLIINYFKGGKLRFKKIKPEAFEANRFYTVINKKSGEIVPMEVNFNFDDPNLIILPLAFGKRQGREFIWNDLLSLETGSLKLANGRVIEKTLYNRRTRQDEPALFVALTFERREVLDSSNIKPMNLIGVDRGENIPAVIALTDPEGCPLSRFKDSLGNPTHILRIGESYKEKQRTIQAKKEVEQRRAGGYSRKYASKAKNLADDMVRNTARDLLYYAVTQDAMLIFENLSRGFGRQGKRTFMAERQYTRMEDWLTAKLAYEGLSKTYLSKTLAQYTSKTCSNCGFTITSADYDRVLEKLKKTATGWMTTINGKELKVEGQITYYNRRKRQNVVKDLSVELDRLSEESVNNDISSWTKGRSGEALSLLKKRFSHRPVQEKFVCLNCGFETHADEQAALNIARSWLFLRSQEYKKYQTNKTTGNTDKRAFVETWQSFYRKKLKEVWKPAV

SEQ ID NO: 40156 - protein, 977 aa, Artificial Sequence
  CasX variant
QEIKRINKIRRRLVKDSNTKKAGKTGPMKTLLVRVMTPDLRERLENLRKKPENIPQPISNTSRANLNKLLTDYTEMKKAILHVYWEEFQKDPVGLMSRVAQPASKKIDQNKLKPEMDEKGNLTTAGFACSQCGQPLFVYKLEQVSEKGKAYTNYFGRCNVAEHEKLILLAQLKPEKDSDEAVTYSLGKFGQRALDFYSIHVTKESTHPVKPLAQIAGNRYASGPVGKALSDACMGTIASFLSKYQDIIIEHQKVVKGNQKRLESLRELAGKENLEYPSVTLPPQPHTKEGVDAYNEVIARVRMWVNLNLWQKLKLSRDDAKPLLRLKGFPSFPLVERQANEVDWWDMVCNVKKLINEKKEDGKVFWQNLAGYKRQEALRPYLSSENDRKKGKKFARYQFGDLLKHLEKKHGEDWGKVYDEAWERIDKKVEGLSKHIKLEEERRSEDAQSKAALTDWLRAKASFVIEGLKEADKDEFSRCELKLQKWYGDLRGKPFAIEAENSILDISGFSKQYNCAFIWQKDGVKKLNLYLIINYFKGGKLRFKKIKPEAFEANRFYTVINKKSGEIVPMEVNFNFDDPNLIILPLAFGKRQGREFIWNDLLSLETGSLKLANGRVIEKTLYNRRTRQDEPALFVALTFERREVLDSSNIKPMNLIGVDRGENIPAVIALTDPEGCPLSRFKDSLGNPTHILRIGESYKEKQRTIQAKKEVEQRRAGGYSRKYASKAKNLADDMVRNTARDLLYYAVTQDAMLIFENLSRGFGRQGKRTFMAERQYTRMEDWLTAKLAYEGLSKTLLSKTLAQYTSKTCSNCGFTITSADYDRVLEKLKKTATGWMTTINGKELKVEGQITYYNRRKRQNVVKDLSVELDRLSEESVNNDISSWTKGRSGEALSLLKKRFSHRPVQEKFVCLNCGFETHADEQAALNIARSWLFLRSQEYKKYQTNKTTGNTDKRAFVETWQSFYRKKLKEVWKPAV

SEQ ID NO: 40157 - protein, 977 aa, Artificial Sequence
  CasX variant
QEIKRINKIRRRLVKDSNTKKAGKTGPMKTLLVRVMTPDLRERLENLRKKPENIPQPISNTSRANLNKLLTDYTEMKKAILHVYWEEFQKDPVGLMSRVAQPASKKIDQNKLKPEMDEKGNLTTAGFACSQCGQPLFVYKLEQVSEKGKAYTNYFGRCNVAEHEKLILLAQLKPEKDSDEAVTYSLGKFGQRALDFYSIHVTKESTHPVKPLAQIAGNRYASGPVGKALSDACMGTIASFLSKYQDIIIEHQKVVKGNQKRLESLRELAGKENLEYPSVTLPPQPHTKEGVDAYNEVIARVRMWVNLNLWQKLKLSRDDAKPLLRLKGFPSFPLVERQANEVDWWDMVCNVKKLINEKKEDGKVFWQNLAGYKRQEALRPYLSSPEDRKKGKKFARYQLGDLLLHLEKKHGEDWGKVYDEAWERIDKKVEGLSKHIKLEEERRSEDAQSKAALTDWLRAKASFVIEGLKEADKDEFCRCELKLQKWYGDLRGKPFAIEAENSILDISGFSKQYNCAFIWQKDGVKKLNLYLIINYFKGGKLRFKKIKPEAFEANRFYTVINKKSGEIVPMEVNFNFDDPNLIILPLAFGKRQGREFIWNDLLSLETGSLKLANGRVIEKTLYNRRTRQDEPALFVALTFERREVLDSSNIKPMNLIGVDRGENIPAVIALTDPEGCPLSRFKDSLGNPTHILRIGESYKEKQRTIQAKKEVEQRRAGGYSRKYASKAKNLANDMVRNTARDLLYYAVTQDAMLIFENLSRGFGRQGKRTFMAERQYTRMEDWLTAKLAYEGLSKTYLSKTLAQYTSKTCSNCGFTITSADYDRVLEKLKKTATGWMTTINGKELKVEGQITYYNRRKRQNVVKDLSVELDRLSEESVNNDISSWTKGRSGEALSLLKKRFSHRPVQEKFVCLNCGFETHADEQAALNIARSWLFLRSQEYKKYQTNKTTGNTDKRAFVETWQSFYRKKLKEVWKPAV

SEQ ID NO: 40158 - protein, 977 aa, Artificial Sequence
  CasX variant
QEIKRINKIRRRLVKDSNTKKAGKTGPMKTLLVRVMTPDLRERLENLRKKPENIPQPISNTSRANLNKLLTDYTEMKKAILHVYWEEFQKDPVGLMSRVAQPASKKIDQNKLKPEMDEKGNLTTAGFACSQCGQPLFVYKLEQVSEKGKAYTNYFGRCNVAEHEKLILLAQLKPEKDSDEAVTYSLGKFGQRALDFYSIHVTKESTHPVKPLAQIAGNRYASGPVGKALSDACMGTIASFLSKYQDIIIEHQKVVKGNQKRLESLRELAGKENLEYPSVTLPPQPHTKEGVDAYNEVIARVRMWVNLNLWQKLKLSRDDAKPLLRLKGFPSFPLVERQANEVDWWDMVCNVKKLINEKKEDGKVFWQNLAGYKRQEALRPYLSSPEDRKKGKKFARYQLGDLLLHLEKKHGEDWGKVYDEAWERIDKKVEGLSKHIKLEEERRSEDAQSKAALTDWLRAKASFVIEGLKEADKDEFCRCELKLQKWYGDLRGKPFAIEAENSILDISGFSKQYNCAFIWQKDGVKKLNLYLIINYFKGGKLRFKKIKPEAFEANRFYTVINKKSGEIVPMEVNFNFDDPNLIILPLAFGKRQGREFIWNDLLSLETGSLKLANGRVIEKPLYNRRTRQDEPALFVALTFERREVLDSSNIKPMNLIGVDRGENIPAVIALTDPEGCPLSRFKDSLGNPTHILRIGESYKEKQRTIQAKKEVEQRRAGGYSRKYASKAKNLADDMVRNTARDLLYYAVTQDAMLIFENLSRGFGRQGKRTFMAERQYTRMEDWLTAKLAYEGLSKTYLSKTLAQYTSKTCSNCGFTITSADYDRVLEKLKKTATGWMTTINGKELKVEGQITYYNRRKRQNVVKDLSVELDRLSEESVNNDISSWTKGRSGEALSLLKKRFSHRPVQEKFVCLNCGFETHADEQAALNIARSWLFLRSQEYKKYQTNKTTGNTDKRAFVETWQSFYRKKLKEVWKPAV

SEQ ID NO: 40159 - protein, 978 aa, Artificial Sequence
  CasX variant
QEIKRINKIRRRLVKDSNTKKAGKTGPMKTLLVRVMTPDLRERLENLRKKPENIPQPISNTSRANLNKLLTDYTEMKKAILHVYWEEFQKDPVGLMSRVAQPASKKIDQNKLKPEMDEKGNLTTAGFACSQCGQPLFVYKLEQVSEKGKAYTNYFGRCNVAEHEKLILLAQLKPEKDSDEAVTYSLGKFGQRALDFYSIHVTKESTHPVKPLAQIAGNRYASGPVGKALSDACMGTIASFLSKYQDIIIEHQKVVKGNQKRLESLRELAGKENLEYPSVTLPPQPHTKEGVDAYNEVIARVRMWVNLNLWQKLKLSRDDAKPLLRLKGFPSFPLVERQANEVDWWDMVCNVKKLINEKKEDGKVFWQNLAGYKRQEALRPYLSSEEDRKKGKKFARYQLGDLLLHLEKKHGEDWGKVYDEAWERIDKKVEGLSKHIKLEEERRSEDAQSKAALTDWLRAKASFVIEGLKEADKDEFCRCELKLQKWYGDLRGKPFAIEAENSILDISGFSKQYNCAFIWQKDGVKKLNLYLIINYFKGGKLRFKKIKPEAFEANRFYTVINKKSGEIVPMEVNFNFDDPNLIILPLAFGKRQGREFIWNDLLSLETGSLKLANGRVIEKTLYNRRTRQDEPALFVALTFEDREVLDSSNIKPMNLIGVDRGENIPAVIALTDPEGCPLSRFKDSLGNPTHILRIGESYKEKQRTIQAKKEVEQRRAGGYSRKYASKAKNLADDMVRNTARDLLYYAVTQDAMLIFENLSRGFGRQGKRTFMAERQYTRMEDWLTAKLAYEGLPSKTYLSKTLAQYTSKTCSNCGFTITSADYDRVLEKLKKTATGWMTTINGKELKVEGQITYYNRYKRQNVVKDLSVELDRLSEESVNNDISSWTKGRSGEALSLLKKRFSHRPVQEKFVCLNCGFETHADEQAALNIARSWLFLRSQEYKKYQTNKTTGNTDKRAFVETWQSFYRKKLKEVWKPAV

SEQ ID NO: 40160 - protein, 979 aa, Artificial Sequence
  CasX variant
QEIKRINKIRRRLVKDSNTKKAGKTGPMKTLLVRVMTPDLRERLENLRKKPENIPQPISNTSRANLNKLLTDYTEMKKAILHVYWEEFQKDPVGLMSRVAQPASKKIDQNKLKPEMDEKGNLTTAGFACSQCGQPLFVYKLEQVSEKGKAYTNYFGRCNVAEHEKLILLAQLKPEKDSDEAVTYSLGKFGQRALDFYSIHVTKESTHPVKPLAQIAGNRYASGPVGKALSDACMGTIASFLSKYQDIIIEHQKVVKGNQKRLESLRELAGKENLEYPSVTLPPQPHTKEGVDAYNEVIARVRMWVNLNLWQKLKLSRDDAKPLLRLKGFPSFPLVERQANEVDWWDMVCNVKKLINEKKEDGKVFWQNLAGYKRQEALRPYLSSEEDRKKGKKFARYQLGDLLLHLEKKHGEDWGKVYDEAWERIDKKVEGLSKHIKLEEERRSEDAQSKAALTDWLRAKASFVIEGLKEADKDEFCRCELKLQKWYGDLRGKHPFAIEAENSILDISGFSKQYNCAFIWQKDGVKKLNLYLIINYFKGGKLRFKKIKPEAFEANRFYTVINKKSGEIVPMEVNFNFDDPNLIILPLAFGKRQGREFIWNDLLSLETGSLKLANGRVIEKTLYNRRTRQDEPALFVALTFERREVLDSSNIKPMNLIGVDRGENIPAVIALTDPEGCPLSRFKDSLGNPTHILRIGESYKEKQRTIQAKKEVEQRRAGGYSRKYASKAKNLADDMVRNTARDLLYYAVTQDAMLIFENLSRGFGRQGKRTFMAERQYTRMEDWLTAKLAYEGLPSKTYLSKTLAQYTSKTCSNCGFTITSADYDRVLEKLKKTATGWMTTINGKELKVEGQITYYNRYKRQNVVKDLSVELDRLSEESVNNDISSWTKGRSGEALSLLKKRFSHRPVQEKFVCLNCGFETHADEQAALNIARSWLFLRSQEYKKYQTNKTTGNTDKRAFVETWQSFYRKKLKEVWKPAV

SEQ ID NO: 40161 - protein, 979 aa, Artificial Sequence
  CasX variant
QEIKRINKIRRRLVKDSNTKKAGKTGPMKTLLVRVMTPDLRERLENLRKKPENIPQPISNTSRANLNKLLTDYTEMKKAILHVYWEEFQKDPVGLMSRVAQPASKKIDQNKLKPEMDEKGNLTTAGFACSQCGQPLFVYKLEQVSEKGKAYTNYFGRCNVAEHEKLILLAQLKPEKDSDEAVTYSLGKFGQRALDFYSIHVTKESTHPVKPLAQIAGNRYASGPVGKALSDACMGTIASFLSKYQDIIIEHQKVVKGNQKRLESLRELAGKENLEYPSVTLPPQPHTKEGVDAYNEVIARVRMWVNLNLWQKLKLSRDDAKPLLRLKGFPSFPLVERQANEVDWWDMVCNVKKLIINEKKEDGKVFWQNLAGYKRQEALRPYLSSEEDRKKGKKFARYQLGDLLLHLEKKHGEDWGKVYDEAWERIDKKVEGLSKHIKLEEERRSEDAQSKAALTDWLRAKASFVIEGLKEADKDEFCRCELKLQKWYGDLRGKPFAIEAENSILDISGFSKQYNCAFIWQKDGVKKLNLYLIINYFKGGKLRFKKIKPEAFEANRFYTVINKKSGEIVPMEVNFNFDDPNLIILPLAFGKRQGREFIWNDLLSLETGSLKLANGRVIEKTLYNRRTRQDEPALFVALTFERREVLDSSNIKPMNLIGVDRGENIPAVIALTDPEGCPLSRFKDSLGNPTHILRIGESYKEKQRTIQAKKEVEQRRAGGYSRKYASKAKNLADDMVRNTARDLLYYAVTQDAMLIFENLSRGFGRQGKRTFMAERQYTRMEDWLTAKLAYEGLPSKTYLSKTLAQYTSKTCSNCGFTITSADYDRVLEKLKKTATGWMTTINGKELKVEGQITYYNRYKRQNVVKDLSVELDRLSEESVNNDISSWTKGRSGEALSLLKKRFSHRPVQEKFVCLNCGFETHADEQAALNIARSWLFLRSQEYKKYQTNKTTGNTDKRAFVETWQSFYRKKLKEVWKPAV

SEQ ID NO: 40162 - protein, 979 aa, Artificial Sequence
  CasX variant
QEIKRINKIRRRLVKDSNTKKAGKTRGPMKTLLVRVMTPDLRERLENLRKKPENIPQPISNTSRANLNKLLTDYTEMKKAILHVYWEEFQKDPVGLMSRVAQPASKKIDQNKLKPEMDEKGNLTTAGFACSQCGQPLFVYKLEQVSEKGKAYTNYFGRCNVAEHEKLILLAQLKPEKDSDEAVTYSLGKFGQRALDFYSIHVTKESTHPVKPLAQIAGNRYASSPVGKALSDACMGTIASFLSKYQDIIIEHQKVVKGNQKRLESLRELAGKENLEYPSVTLPPQPHTKEGVDAYNEVIARVRMWVNLNLWQKLKLSRDDAKPLLRLKGFPSFPLVERQANEVDWWDMVCNVKKLINEKKEDGKVFWQNLAGYKRQEALRPYLSSEEDRKKGKKFARYQLGDLLLHLEKKHGEDWGKVYDEAWERIDKKVEGLSKHIKLEEERRSEDAQSKAALTDWLRAKASFVIEGLKEADKDEFCRCELKLQKWYGDLRGKPFAIEAENSILDISGFSKQYNCAFIWQKDGVKKLNLYLIINYFKGGKLRFKKIKPEAFEANRFYTVINKKSGEIVPMEVNFNFDDPNLIILPLAFGKRQGREFIWNDLLSLETGSLKLANGRVIEKTLYNRRTRQDEPALFVALTFERREVLDSSNIKPMNLIGVDRGENIPAVIALTDPEGCPLSRFKDSLGNPTHILRIGESYKEKQRTIQAKKEVEQRRAGGYSRKYASKAKNLADDMVRNTARDLLYYAVTQDAMLIFENLSRGFGRQGKRTFMAERQYTRMEDWLTAKLAYEGLPSKTYLSKTLAQYTSKTCSNCGFTITSADYDRVLEKLKKTATGWMTTINGKELKVEGQITYYNRYKRQNVVKDLSVELDRLSEESVNNDISSWTKGRSGEALSLLKKRFSHRPVQEKFVCLNCGFETHADEQAALNIARSWLFLRSQEYKKYQTNKTTGNTDKRAFVETWQSFYRKKLKEVWKPAV

SEQ ID NO: 40163 - protein, 979 aa, Artificial Sequence
  CasX variant
QEIKRINKIRRRLVKDSNTKKAGKTRGPMKTLLVRVMTPDLRERLENLRKKPENIPQPISNTSRANLNKLLTDYTEMKKAILHVYWEEFQKDPVGLMSRVAQPASKKIDQNKLKPEMDEKGNLTTAGFACSQCGQPLFVYKLEQVSEKGKAYTNYFGRCNVAEHEKLILLAQLKPEKDSDEAVTYSLGKFGQRALDFYSIHVTKESTHPVKPLAQIAGNRYASGPVGKALSGACMGTIASFLSKYQDIIIEHQKVVKGNQKRLESLRELAGKENLEYPSVTLPPQPHTKEGVDAYNEVIARVRMWVNLNLWQKLKLSRDDAKPLLRLKGFPSFPLVERQANEVDWWDMVCNVKKLINEKKEDGKVFWQNLAGYKRQEALRPYLSSEEDRKKGKKFARYQLGDLLLHLEKKHGEDWGKVYDEAWERIDKKVEGLSKHIKLEEERRSEDAQSKAALTDWLRAKASFVIEGLKEADKDEFCRCELKLQKWYGDLRGKPFAIEAENSILDISGFSKQYNCAFIWQKDGVKKLNLYLIINYFKGGKLRFKKIKPEAFEANRFYTVINKKSGEIVPMEVNFNFDDPNLIILPLAFGKRQGREFIWNDLLSLETGSLKLANGRVIEKTLYNRRTRQDEPALFVALTFERREVLDSSNIKPMNLIGVDRGENIPAVIALTDPEGCPLSRFKDSLGNPTHILRIGESYKEKQRTIQAKKEVEQRRAGGYSRKYASKAKNLADDMVRNTARDLLYYAVTQDAMLIFENLSRGFGRQGKRTFMAERQYTRMEDWLTAKLAYEGLPSKTYLSKTLAQYTSKTCSNCGFTITSADYDRVLEKLKKTATGWMTTINGKELKVEGQITYYNRYKRQNVVKDLSVELDRLSEESVNNDISSWTKGRSGEALSLLKKRFSHRPVQEKFVCLNCGFETHADEQAALNIARSWLFLRSQEYKKYQTNKTTGNTDKRAFVETWQSFYRKKLKEVWKPAV

SEQ ID NO: 40164 - protein, 978 aa, Artificial Sequence
  CasX variant
QEIKRINKIRRRLVKDSNTKKAGKTGPMKTLLVRVMTPDLRERLENLRKKPENIPQPISNTSRANLNKLLTDYTEMKKAILHVYWEEFQKDPVGLMSRVAQPASKKIDQNKLKPEMDEKGNLTTAGFACSQCGQPLFVYKLEQVSEKGKAYTNYFGRCNVAEHEKLILLAQLKPEKDSDEAVTYSLGKFGQRALDFYSIHVTKESTHPVKPLAQIAGNRYASGPVGKALSDACMGTIASFLSKYQDIIIEHQKVVKGNQKRLESLRELAGKENLEYPSVTLPPQPHTKEGVDAYNEVIARVRMWVNLNLWQKLKLSRDDAKPLLRLKGFPSFPLVERQANEVDWWDMVCNVKKLINEKKEDGKVFWQNLAGYKRQEALRPYLSSPEDRKKGKKFARYQFGDLLLHLEKKHGEDWGKVYDEAWERIDKKVEGLSKHIKLEEERRSEDAQSKAALTDWLRAKASFVIEGLKEADKDEFCRCELKLQKWYGDLRGKPFAIEAENSILDISGFSKQYNCAFIWQKDGVKKLNLYLIINYFKGGKLRFKKIKPEAFEANRFYTVINKKSGEIVPMEVNFNFDDPNLIILPLAFGKRQGREFIWNDLLSLETGSLKLANGRVIEKTLYNRRTRQDEPALFVALTFERREVLDSSNIKPMNLIGVDRGENIPAVIALTDPEGCPLSRFKDSLGNPTHILRIGESYKEKQRTIQAKKEVEQRRAGGYSRKYASKAKNLANDMVRNTARDLLYYAVTQDAMLIFENLSRGFGRQGKRTFMAERQYTRMEDWLTAKLAYEGLPSKTYLSKTLAQYTSKTCSNCGFTITSADYDRVLEKLKKTATGWMTTINGKELKVEGQITYYNRRKRQNVVKDLSVELDRLSEESVNNDISSWTKGRSGEALSLLKKRFSHRPVQEKFVCLNCGFETHADEQAALNIARSWLFLRSQEYKKYQTNKTTGNTDKRAFVETWQSFYRKKLKEVWKPAV

SEQ ID NO: 40165 - protein, 978 aa, Artificial Sequence
  CasX variant
QEIKRINKIRRRLVKDSNTKKAGKTGPMKTLLVRVMTPDLRERLENLRKKPENIPQPISNTSRANLNKLLTDYTEMKKAILHVYWEEFQKDPVGLMSRVAQPASKKIDQNKLKPEMDEKGNLTTAGFACSQCGQPLFVYKLEQVSEKGKAYTNYFGRCNVAEHEKLIKLAQLKPEKDSDEAVTYSLGKFGQRALDFYSIHVTKESTHPVKPLAQIAGNRYASSPVGKALSDACMGTIASFLSKYQDIIIEHQKVVKGNQKRLESLRELAGKENLEYPSVTLPPQPHTKEGVDAYNEVIARVRMWVNLNLWQKLKLSRDDAKPLLRLKGFPSFPLVERQANEVDWWDMVCNVKKLINEKKEDGKVFWQNLAGYKRQEALRPYLSSEEDRKKGKKFARYQLGDLLLHLEKKHGEDWGKVYDEAWERIDKKVEGLSKHIKLEEERRSEDAQSKAALTDWLRAKASFVIEGLKEADKDEFCRCELKLQKWYGDLRGKPFAIEAENSILDISGFSKQYNCAFIWQKDGVKKLNLYLIINYFKGGKLRFKKIKPEAFEANRFYTVINKKSGEIVPMEVNFNFDDPNLIILPLAFGKRQGREFIWNDLLSLETGSLKLANGRVIEKTLYNRRTRQDEPALFVALTFERREVLDSSNIKPMNLIGVDRGENIPAVIALTDPEGCPLSRFKDSLGNPTHILRIGESYKEKQRTIQAKKEVEQRRAGGYSRKYASKAKNLADDMVRNTARDLLYYAVTQDAMLIFENLSRGFGRQGKRTFMAERQYTRMEDWLTAKLAYEGLPSKTYLSKTLAQYTSKTCSNCGFTITSADYDRVLEKLKKTATGWMTTINGKELKVEGQITYYNRYKRQNVVKDLSVELDRLSEESVNNDISSWTKGRSGEALSLLKKRFSHRPVQEKFVCLNCGFETHADEQAALNIARSWLFLRSQEYKKYQTNKTTGNTDKRAFVETWQSFYRKKLKEVWKPAV

SEQ ID NO: 40166 - protein, 978 aa, Artificial Sequence
  CasX variant
QEIKRINKIRRRLVKDSNTKKAGKTGPMKTLLVRVMTPDLRERLENLRKKPENIPQPISNTSRANLNKLLTDYTEMKKAILHVYWEEFQKDPVGLMSRVAQPASKKIDQNKLKPEMDEKGNLTTAGFACSQCGQPLFVYKLEQVSEKGKAYTNYFGRCNVAEHEKLILLAQLKPEKDSDEAVTYSLGKFGQRALDFYSIHVTKESTHPVKPLAQIAGNRYASSPVGKALSGACMGTIASFLSKYQDIIIEHQKVVKGNQKRLESLRELAGKENLEYPSVTLPPQPHTKEGVDAYNEVIARVRMWVNLNLWQKLKLSRDDAKPLLRLKGFPSFPLVERQANEVDWWDMVCNVKKLINEKKEDGKVFWQNLAGYKRQEALRPYLSSEEDRKKGKKFARYQLGDLLLHLEKKHGEDWGKVYDEAWERIDKKVEGLSKHIKLEEERRSEDAQSKAALTDWLRAKASFVIEGLKEADKDEFCRCELKLQKWYGDLRGKPFAIEAENSILDISGFSKQYNCAFIWQKDGVKKLNLYLIINYFKGGKLRFKKIKPEAFEANRFYTVINKKSGEIVPMEVNFNFDDPNLIILPLAFGKRQGREFIWNDLLSLETGSLKLANGRVIEKTLYNRRTRQDEPALFVALTFERREVLDSSNIKPMNLIGVDRGENIPAVIALTDPEGCPLSRFKDSLGNPTHILRIGESYKEKQRTIQAKKEVEQRRAGGYSRKYASKAKNLADDMVRNTARDLLYYAVTQDAMLIFENLSRGFGRQGKRTFMAERQYTRMEDWLTAKLAYEGLPSKTYLSKTLAQYTSKTCSNCGFTITSADYDRVLEKLKKTATGWMTTINGKELKVEGQITYYNRYKRQNVVKDLSVELDRLSEESVNNDISSWTKGRSGEALSLLKKRFSHRPVQEKFVCLNCGFETHADEQAALNIARSWLFLRSQEYKKYQTNKTTGNTDKRAFVETWQSFYRKKLKEVWKPAV

SEQ ID NO: 40167 - protein, 978 aa, Artificial Sequence
  CasX variant
QEIKRINKIRRRLVKDSNTKKAGKTGPMKTLLVRVMTPDLRERLENLRKKPENIPQPISNTSRANLNKLLTDYTEMKKAILHVYWEEFQKDPVGLMSRVAQPASKKIDQNKLKPEMDEKGNLTTAGFACSQCGQPLFVYKLEQVSEKGKAYTNYFGRCNVAEHEKLIKLAQLKPEKDSDEAVTYSLGKFGQRALDFYSIHVTKESTHPVKPLAQIAGNRYASSPVGKALSGACMGTIASFLSKYQDIIIEHQKVVKGNQKRLESLRELAGKENLEYPSVTLPPQPHTKEGVDAYNEVIARVRMWVNLNLWQKLKLSRDDAKPLLRLKGFPSFPLVERQANEVDWWDMVCNVKKLINEKKEDGKVFWQNLAGYKRQEALRPYLSSEEDRKKGKKFARYQLGDLLLHLEKKHGEDWGKVYDEAWERIDKKVEGLSKHIKLEEERRSEDAQSKAALTDWLRAKASFVIEGLKEADKDEFCRCELKLQKWYGDLRGKPFAIEAENSILDISGFSKQYNCAFIWQKDGVKKLNLYLIINYFKGGKLRFKKIKPEAFEANRFYTVINKKSGEIVPMEVNFNFDDPNLIILPLAFGKRQGREFIWNDLLSLETGSLKLANGRVIEKTLYNRRTRQDEPALFVALTFERREVLDSSNIKPMNLIGVDRGENIPAVIALTDPEGCPLSRFKDSLGNPTHILRIGESYKEKQRTIQAKKEVEQRRAGGYSRKYASKAKNLADDMVRNTARDLLYYAVTQDAMLIFENLSRGFGRQGKRTFMAERQYTRMEDWLTAKLAYEGLPSKTYLSKTLAQYTSKTCSNCGFTITSADYDRVLEKLKKTATGWMTTINGKELKVEGQITYYNRYKRQNVVKDLSVELDRLSEESVNNDISSWTKGRSGEALSLLKKRFSHRPVQEKFVCLNCGFETHADEQAALNIARSWLFLRSQEYKKYQTNKTTGNTDKRAFVETWQSFYRKKLKEVWKPAV

SEQ ID NO: 40168 - protein, 979 aa, Artificial Sequence
  CasX variant
QEIKRINKIRRRLVKDSNTKKAGKTRGPMKTLLVRVMTPDLRERLENLRKKPENIPQPISNTSRANLNKLLTDYTEMKKAILHVYWEEFQKDPVGLMSRVAQPASKKIDQNKLKPEMDEKGNLTTAGFACSQCGQPLFVYKLEQVSEKGKAYTNYFGRCNVAEHEKLIKLAQLKPEKDSDEAVTYSLGKFGQRALDFYSIHVTKESTHPVKPLAQIAGNRYASGPVGKALSDACMGTIASFLSKYQDIIIEHQKVVKGNQKRLESLRELAGKENLEYPSVTLPPQPHTKEGVDAYNEVIARVRMWVNLNLWQKLKLSRDDAKPLLRLKGFPSFPLVERQANEVDWWDMVCNVKKLINEKKEDGKVFWQNLAGYKRQEALRPYLSSEEDRKKGKKFARYQLGDLLLHLEKKHGEDWGKVYDEAWERIDKKVEGLSKHIKLEEERRSEDAQSKAALTDWLRAKASFVIEGLKEADKDEFCRCELKLQKWYGDLRGKPFAIEAENSILDISGFSKQYNCAFIWQKDGVKKLNLYLIINYFKGGKLRFKKIKPEAFEANRFYTVINKKSGEIVPMEVNFNFDDPNLIILPLAFGKRQGREFIWNDLLSLETGSLKLANGRVIEKTLYNRRTRQDEPALFVALTFERREVLDSSNIKPMNLIGVDRGENIPAVIALTDPEGCPLSRFKDSLGNPTHILRIGESYKEKQRTIQAKKEVEQRRAGGYSRKYASKAKNLADDMVRNTARDLLYYAVTQDAMLIFENLSRGFGRQGKRTFMAERQYTRMEDWLTAKLAYEGLPSKTYLSKTLAQYTSKTCSNCGFTITSADYDRVLEKLKKTATGWMTTINGKELKVEGQITYYNRYKRQNVVKDLSVELDRLSEESVNNDISSWTKGRSGEALSLLKKRFSHRPVQEKFVCLNCGFETHADEQAALNIARSWLFLRSQEYKKYQTNKTTGNTDKRAFVETWQSFYRKKLKEVWKPAV

SEQ ID NO: 40169 - protein, 979 aa, Artificial Sequence
  CasX variant
QEIKRINKIRRRLVKDSNTKKAGKTRGPMKTLLVRVMTPDLRERLENLRKKPENIPQPISNTSRANLNKLLTDYTEMKKAILHVYWEEFQKDPVGLMSRVAQPASKKIDQNKLKPEMDEKGNLTTAGFACSQCGQPLFVYKLEQVSEKGKAYTNYFGRCNVAEHEKLIKLAQLKPEKDSDEAVTYSLGKFGQRALDFYSIHVTKESTHPVKPLAQIAGNRYASSPVGKALSDACMGTIASFLSKYQDIIIEHQKVVKGNQKRLESLRELAGKENLEYPSVTLPPQPHTKEGVDAYNEVIARVRMWVNLNLWQKLKLSRDDAKPLLRLKGFPSFPLVERQANEVDWWDMVCNVKKLINEKKEDGKVFWQNLAGYKRQEALRPYLSSEEDRKKGKKFARYQLGDLLLHLEKKHGEDWGKVYDEAWERIDKKVEGLSKHIKLEEERRSEDAQSKAALTDWLRAKASFVIEGLKEADKDEFCRCELKLQKWYGDLRGKPFAIEAENSILDISGFSKQYNCAFIWQKDGVKKLNLYLIINYFKGGKLRFKKIKPEAFEANRFYTVINKKSGEIVPMEVNFNFDDPNLIILPLAFGKRQGREFIWNDLLSLETGSLKLANGRVIEKTLYNRRTRQDEPALFVALTFERREVLDSSNIKPMNLIGVDRGENIPAVIALTDPEGCPLSRFKDSLGNPTHILRIGESYKEKQRTIQAKKEVEQRRAGGYSRKYASKAKNLADDMVRNTARDLLYYAVTQDAMLIFENLSRGFGRQGKRTFMAERQYTRMEDWLTAKLAYEGLPSKTYLSKTLAQYTSKTCSNCGFTITSADYDRVLEKLKKTATGWMTTINGKELKVEGQITYYNRYKRQNVVKDLSVELDRLSEESVNNDISSWTKGRSGEALSLLKKRFSHRPVQEKFVCLNCGFETHADEQAALNIARSWLFLRSQEYKKYQTNKTTGNTDKRAFVETWQSFYRKKLKEVWKPAV

SEQ ID NO: 40170 - protein, 979 aa, Artificial Sequence
  CasX variant
QEIKRINKIRRRLVKDSNTKKAGKTRGPMKTLLVRVMTPDLRERLENLRKKPENIPQPISNTSRANLNKLLTDYTEMKKAILHVYWEEFQKDPVGLMSRVAQPASKKIDQNKLKPEMDEKGNLTTAGFACSQCGQPLFVYKLEQVSEKGKAYTNYFGRCNVAEHEKLIKLAQLKPEKDSDEAVTYSLGKFGQRALDFYSIHVTKESTHPVKPLAQIAGNRYASSPVGKALSGACMGTIASFLSKYQDIIIEHQKVVKGNQKRLESLRELAGKENLEYPSVTLPPQPHTKEGVDAYNEVIARVRMWVNLNLWQKLKLSRDDAKPLLRLKGFPSFPLVERQANEVDWWDMVCNVKKLINEKKEDGKVFWQNLAGYKRQEALRPYLSSEEDRKKGKKFARYQLGDLLLHLEKKHGEDWGKVYDEAWERIDKKVEGLSKHIKLEEERRSEDAQSKAALTDWLRAKASFVIEGLKEADKDEFCRCELKLQKWYGDLRGKPFAIEAENSILDISGFSKQYNCAFIWQKDGVKKLNLYLIINYFKGGKLRFKKIKPEAFEANRFYTVINKKSGEIVPMEVNFNFDDPNLIILPLAFGKRQGREFIWNDLLSLETGSLKLANGRVIEKTLYNRRTRQDEPALFVALTFERREVLDSSNIKPMNLIGVDRGENIPAVIALTDPEGCPLSRFKDSLGNPTHILRIGESYKEKQRTIQAKKEVEQRRAGGYSRKYASKAKNLADDMVRNTARDLLYYAVTQDAMLIFENLSRGFGRQGKRTFMAERQYTRMEDWLTAKLAYEGLPSKTYLSKTLAQYTSKTCSNCGFTITSADYDRVLEKLKKTATGWMTTINGKELKVEGQITYYNRYKRQNVVKDLSVELDRLSEESVNNDISSWTKGRSGEALSLLKKRFSHRPVQEKFVCLNCGFETHADEQAALNIARSWLFLRSQEYKKYQTNKTTGNTDKRAFVETWQSFYRKKLKEVWKPAV

SEQ ID NO: 40171 - protein, 978 aa, Artificial Sequence
  CasX variant
QEIKRINKIRRRLVKDSNTKKAGKTGPMKTLLVRVMTPDLRERLENLRKKPENIPQPISNTSRANLNKLLTDYTEMKKAILHVYWEEFQKDPVGLMSRVAQPASKKIDQNKLKPEMDEKGNLTTAGFACSQCGQPLFVYKLEQVSEKGKAYTNYFGRCNVAEHEKLILLAQLKPEKDSDEAVTYSLGKFGQRALDFYSIHVTKESTHPVKPLAQIAGNRYASYPVGKALSGACMGTIASFLSKYQDIIIEHQKVVKGNQKRLESLRELAGKENLEYPSVTLPPQPHTKEGVDAYNEVIARVRMWVNLNLWQKLKLSRDDAKPLLRLKGFPSFPLVERQANEVDWWDMVCNVKKLINEKKEDGKVFWQNLAGYKRQEALRPYLSSEEDRKKGKKFARYQLGDLLLHLEKKHGEDWGKVYDEAWERIDKKVEGLSKHIKLEEERRSEDAQSKAALTDWLRAKASFVIEGLKEADKDEFCRCELKLQKWYGDLRGKPFAIEAENSILDISGFSKQYNCAFIWQKDGVKKLNLYLIINYFKGGKLRFKKIKPEAFEANRFYTVINKKSGEIVPMEVNFNFDDPNLIILPLAFGKRQGREFIWNDLLSLETGSLKLANGRVIEKTLYNRRTRQDEPALFVALTFERREVLDSSNIKPMNLIGVDRGENIPAVIALTDPEGCPLSRFKDSLGNPTHILRIGESYKEKQRTIQAKKEVEQRRAGGYSRKYASKAKNLADDMVRNTARDLLYYAVTQDAMLIFENLSRGFGRQGKRTFMAERQYTRMEDWLTAKLAYEGLPSKTYLSKTLAQYTSKTCSNCGFTITSADYDRVLEKLKKTATGWMTTINGKELKVEGQITYYNRYKRQNVVKDLSVELDRLSEESVNNDISSWTKGRSGEALSLLKKRFSHRPVQEKFVCLNCGFETHADEQAALNIARSWLFLRSQEYKKYQTNKTTGNTDKRAFVETWQSFYRKKLKEVWKPAV

SEQ ID NO: 40172 - protein, 978 aa, Artificial Sequence
  CasX variant
QEIKRINKIRRRLVKDSNTKKAGKTGPMKTLLVRVMTPDLRERLENLRKKPENIPQPISNTSRANLNKLLTDYTEMKKAILHVYWEEFQKDPVGLMSRVAQPASKKIDQNKLKPEMDEKGNLTTAGFACSQCGQPLFVYKLEQVSEKGKAYTNYFGRCNVAEHEKLILLAQLKPEKDSDEAVTYSLGKFGQRALDFYSIHVTKESTHPVKPLAQIAGNRYASHPVGKALSGACMGTIASFLSKYQDIIIEHQKVVKGNQKRLESLRELAGKENLEYPSVTLPPQPHTKEGVDAYNEVIARVRMWVNLNLWQKLKLSRDDAKPLLRLKGFPSFPLVERQANEVDWWDMVCNVKKLINEKKEDGKVFWQNLAGYKRQEALRPYLSSEEDRKKGKKFARYQLGDLLLHLEKKHGEDWGKVYDEAWERIDKKVEGLSKHIKLEEERRSEDAQSKAALTDWLRAKASFVIEGLKEADKDEFCRCELKLQKWYGDLRGKPFAIEAENSILDISGFSKQYNCAFIWQKDGVKKLNLYLIINYFKGGKLRFKKIKPEAFEANRFYTVINKKSGEIVPMEVNFNFDDPNLIILPLAFGKRQGREFIWNDLLSLETGSLKLANGRVIEKTLYNRRTRQDEPALFVALTFERREVLDSSNIKPMNLIGVDRGENIPAVIALTDPEGCPLSRFKDSLGNPTHILRIGESYKEKQRTIQAKKEVEQRRAGGYSRKYASKAKNLADDMVRNTARDLLYYAVTQDAMLIFENLSRGFGRQGKRTFMAERQYTRMEDWLTAKLAYEGLPSKTYLSKTLAQYTSKTCSNCGFTITSADYDRVLEKLKKTATGWMTTINGKELKVEGQITYYNRYKRQNVVKDLSVELDRLSEESVNNDISSWTKGRSGEALSLLKKRFSHRPVQEKFVCLNCGFETHADEQAALNIARSWLFLRSQEYKKYQTNKTTGNTDKRAFVETWQSFYRKKLKEVWKPAV

SEQ ID NO: 40173 - protein, 979 aa, Artificial Sequence
  CasX variant
QEIKRINKIRRRLVKDSNTKKAGKTRGPMKTLLVRVMTPDLRERLENLRKKPENIPQPISNTSRANLNKLLTDYTEMKKAILHVYWEEFQKDPVGLMSRVAQPASKKIDQNKLKPEMDEKGNLTTAGFACSQCGQPLFVYKLEQVSEKGKAYTNYFGRCNVAEHEKLILLAQLKPEKDSDEAVTYSLGKFGQRALDFYSIHVTKESTHPVKPLAQIAGNRYASYPVGKALSGACMGTIASFLSKYQDIIIEHQKVVKGNQKRLESLRELAGKENLEYPSVTLPPQPHTKEGVDAYNEVIARVRMWVNLNLWQKLKLSRDDAKPLLRLKGFPSFPLVERQANEVDWWDMVCNVKKLINEKKEDGKVFWQNLAGYKRQEALRPYLSSEEDRKKGKKFARYQLGDLLLHLEKKHGEDWGKVYDEAWERIDKKVEGLSKHIKLEEERRSEDAQSKAALTDWLRAKASFVIEGLKEADKDEFCRCELKLQKWYGDLRGKPFAIEAENSILDISGFSKQYNCAFIWQKDGVKKLNLYLIINYFKGGKLRFKKIKPEAFEANRFYTVINKKSGEIVPMEVNFNFDDPNLIILPLAFGKRQGREFIWNDLLSLETGSLKLANGRVIEKTLYNRRTRQDEPALFVALTFERREVLDSSNIKPMNLIGVDRGENIPAVIALTDPEGCPLSRFKDSLGNPTHILRIGESYKEKQRTIQAKKEVEQRRAGGYSRKYASKAKNLADDMVRNTARDLLYYAVTQDAMLIFENLSRGFGRQGKRTFMAERQYTRMEDWLTAKLAYEGLPSKTYLSKTLAQYTSKTCSNCGFTITSADYDRVLEKLKKTATGWMTTINGKELKVEGQITYYNRYKRQNVVKDLSVELDRLSEESVNNDISSWTKGRSGEALSLLKKRFSHRPVQEKFVCLNCGFETHADEQAALNIARSWLFLRSQEYKKYQTNKTTGNTDKRAFVETWQSFYRKKLKEVWKPAV

SEQ ID NO: 40174 - protein, 979 aa, Artificial Sequence
  CasX variant
QEIKRINKIRRRLVKDSNTKKAGKTRGPMKTLLVRVMTPDLRERLENLRKKPENIPQPISNTSRANLNKLLTDYTEMKKAILHVYWEEFQKDPVGLMSRVAQPASKKIDQNKLKPEMDEKGNLTTAGFACSQCGQPLFVYKLEQVSEKGKAYTNYFGRCNVAEHEKLILLAQLKPEKDSDEAVTYSLGKFGQRALDFYSIHVTKESTHPVKPLAQIAGNRYASHPVGKALSGACMGTIASFLSKYQDIIIEHQKVVKGNQKRLESLRELAGKENLEYPSVTLPPQPHTKEGVDAYNEVIARVRMWVNLNLWQKLKLSRDDAKPLLRLKGFPSFPLVERQANEVDWWDMVCNVKKLINEKKEDGKVFWQNLAGYKRQEALRPYLSSEEDRKKGKKFARYQLGDLLLHLEKKHGEDWGKVYDEAWERIDKKVEGLSKHIKLEEERRSEDAQSKAALTDWLRAKASFVIEGLKEADKDEFCRCELKLQKWYGDLRGKPFAIEAENSILDISGFSKQYNCAFIWQKDGVKKLNLYLIINYFKGGKLRFKKIKPEAFEANRFYTVINKKSGEIVPMEVNFNFDDPNLIILPLAFGKRQGREFIWNDLLSLETGSLKLANGRVIEKTLYNRRTRQDEPALFVALTFERREVLDSSNIKPMNLIGVDRGENIPAVIALTDPEGCPLSRFKDSLGNPTHILRIGESYKEKQRTIQAKKEVEQRRAGGYSRKYASKAKNLADDMVRNTARDLLYYAVTQDAMLIFENLSRGFGRQGKRTFMAERQYTRMEDWLTAKLAYEGLPSKTYLSKTLAQYTSKTCSNCGFTITSADYDRVLEKLKKTATGWMTTINGKELKVEGQITYYNRYKRQNVVKDLSVELDRLSEESVNNDISSWTKGRSGEALSLLKKRFSHRPVQEKFVCLNCGFETHADEQAALNIARSWLFLRSQEYKKYQTNKTTGNTDKRAFVETWQSFYRKKLKEVWKPAV

SEQ ID NO: 40175 - protein, 978 aa, Artificial Sequence
  CasX variant
QEIKRINKIRRRLVKDSNTKKAGKTGPMKTLLVRVMTPDLRERLENLRKKPENIPQPISNTSRANLNKLLTDYTEMKKAILHVYWEEFQKDPVGLMSRVAQPASKKIDQNKLKPEMDEKGNLTTAGFACSQCGQPLFVYKLEQVSEKGKAYTNYFGRCNVAEHEKLIKLAQLKPEKDSDEAVTYSLGKFGQRALDFYSIHVTKESTHPVKPLAQIAGNRYASGPVGKALSGACMGTIASFLSKYQDIIIEHQKVVKGNQKRLESLRELAGKENLEYPSVTLPPQPHTKEGVDAYNEVIARVRMWVNLNLWQKLKLSRDDAKPLLRLKGFPSFPLVERQANEVDWWDMVCNVKKLINEKKEDGKVFWQNLAGYKRQEALRPYLSSEEDRKKGKKFARYQLGDLLLHLEKKHGEDWGKVYDEAWERIDKKVEGLSKHIKLEEERRSEDAQSKAALTDWLRAKASFVIEGLKEADKDEFCRCELKLQKWYGDLRGKPFAIEAENSILDISGFSKQYNCAFIWQKDGVKKLNLYLIINYFKGGKLRFKKIKPEAFEANRFYTVINKKSGEIVPMEVNFNFDDPNLIILPLAFGKRQGREFIWNDLLSLETGSLKLANGRVIEKTLYNRRTRQDEPALFVALTFERREVLDSSNIKPMNLIGVDRGENIPAVIALTDPEGCPLSRFKDSLGNPTHILRIGESYKEKQRTIQAKKEVEQRRAGGYSRKYASKAKNLADDMVRNTARDLLYYAVTQDAMLIFENLSRGFGRQGKRTFMAERQYTRMEDWLTAKLAYEGLPSKTYLSKTLAQYTSKTCSNCGFTITSADYDRVLEKLKKTATGWMTTINGKELKVEGQITYYNRYKRQNVVKDLSVELDRLSEESVNNDISSWTKGRSGEALSLLKKRFSHRPVQEKFVCLNCGFETHADEQAALNIARSWLFLRSQEYKKYQTNKTTGNTDKRAFVETWQSFYRKKLKEVWKPAV

SEQ ID NO: 40176 - protein, 978 aa, Artificial Sequence
  CasX variant
QEIKRINKIRRRLVKDSNTKKAGKTGPMKTLLVRVMTPDLRERLENLRKKPENIPQPISNTSRANLNKLLTDYTEMKKAILHVYWEEFQKDPVGLMSRVAQPASKKIDQNKLKPEMDEKGNLTTAGFACSQCGQPLFVYKLEQVSEKGKAYTNYFGRCNVAEHEKLIKLAQLKPEKDSDEAVTYSLGKFGQRALDFYSIHVTKESTHPVKPLAQIAGNRYASYPVGKALSGACMGTIASFLSKYQDIIIEHQKVVKGNQKRLESLRELAGKENLEYPSVTLPPQPHTKEGVDAYNEVIARVRMWVNLNLWQKLKLSRDDAKPLLRLKGFPSFPLVERQANEVDWWDMVCNVKKLINEKKEDGKVFWQNLAGYKRQEALRPYLSSEEDRKKGKKFARYQLGDLLLHLEKKHGEDWGKVYDEAWERIDKKVEGLSKHIKLEEERRSEDAQSKAALTDWLRAKASFVIEGLKEADKDEFCRCELKLQKWYGDLRGKPFAIEAENSILDISGFSKQYNCAFIWQKDGVKKLNLYLIINYFKGGKLRFKKIKPEAFEANRFYTVINKKSGEIVPMEVNFNFDDPNLIILPLAFGKRQGREFIWNDLLSLETGSLKLANGRVIEKTLYNRRTRQDEPALFVALTFERREVLDSSNIKPMNLIGVDRGENIPAVIALTDPEGCPLSRFKDSLGNPTHILRIGESYKEKQRTIQAKKEVEQRRAGGYSRKYASKAKNLADDMVRNTARDLLYYAVTQDAMLIFENLSRGFGRQGKRTFMAERQYTRMEDWLTAKLAYEGLPSKTYLSKTLAQYTSKTCSNCGFTITSADYDRVLEKLKKTATGWMTTINGKELKVEGQITYYNRYKRQNVVKDLSVELDRLSEESVNNDISSWTKGRSGEALSLLKKRFSHRPVQEKFVCLNCGFETHADEQAALNIARSWLFLRSQEYKKYQTNKTTGNTDKRAFVETWQSFYRKKLKEVWKPAV

SEQ ID NO: 40177 - protein, 979 aa, Artificial Sequence
  CasX variant
QEIKRINKIRRRLVKDSNTKKAGKTRGPMKTLLVRVMTPDLRERLENLRKKPENIPQPISNTSRANLNKLLTDYTEMKKAILHVYWEEFQKDPVGLMSRVAQPASKKIDQNKLKPEMDEKGNLTTAGFACSQCGQPLFVYKLEQVSEKGKAYTNYFGRCNVAEHEKLIKLAQLKPEKDSDEAVTYSLGKFGQRALDFYSIHVTKESTHPVKPLAQIAGNRYASGPVGKALSGACMGTIASFLSKYQDIIIEHQKVVKGNQKRLESLRELAGKENLEYPSVTLPPQPHTKEGVDAYNEVIARVRMWVNLNLWQKLKLSRDDAKPLLRLKGFPSFPLVERQANEVDWWDMVCNVKKLINEKKEDGKVFWQNLAGYKRQEALRPYLSSEEDRKKGKKFARYQLGDLLLHLEKKHGEDWGKVYDEAWERIDKKVEGLSKHIKLEEERRSEDAQSKAALTDWLRAKASFVIEGLKEADKDEFCRCELKLQKWYGDLRGKPFAIEAENSILDISGFSKQYNCAFIWQKDGVKKLNLYLIINYFKGGKLRFKKIKPEAFEANRFYTVINKKSGEIVPMEVNFNFDDPNLIILPLAFGKRQGREFIWNDLLSLETGSLKLANGRVIEKTLYNRRTRQDEPALFVALTFERREVLDSSNIKPMNLIGVDRGENIPAVIALTDPEGCPLSRFKDSLGNPTHILRIGESYKEKQRTIQAKKEVEQRRAGGYSRKYASKAKNLADDMVRNTARDLLYYAVTQDAMLIFENLSRGFGRQGKRTFMAERQYTRMEDWLTAKLAYEGLPSKTYLSKTLAQYTSKTCSNCGFTITSADYDRVLEKLKKTATGWMTTINGKELKVEGQITYYNRYKRQNVVKDLSVELDRLSEESVNNDISSWTKGRSGEALSLLKKRFSHRPVQEKFVCLNCGFETHADEQAALNIARSWLFLRSQEYKKYQTNKTTGNTDKRAFVETWQSFYRKKLKEVWKPAV

SEQ ID NO: 40178 - protein, 979 aa, Artificial Sequence
  CasX variant
QEIKRINKIRRRLVKDSNTKKAGKTRGPMKTLLVRVMTPDLRERLENLRKKPENIPQPISNTSRANLNKLLTDYTEMKKAILHVYWEEFQKDPVGLMSRVAQPASKKIDQNKLKPEMDEKGNLTTAGFACSQCGQPLFVYKLEQVSEKGKAYTNYFGRCNVAEHEKLIKLAQLKPEKDSDEAVTYSLGKFGQRALDFYSIHVTKESTHPVKPLAQIAGNRYASYPVGKALSGACMGTIASFLSKYQDIIIEHQKVVKGNQKRLESLRELAGKENLEYPSVTLPPQPHTKEGVDAYNEVIARVRMWVNLNLWQKLKLSRDDAKPLLRLKGFPSFPLVERQANEVDWWDMVCNVKKLINEKKEDGKVFWQNLAGYKRQEALRPYLSSEEDRKKGKKFARYQLGDLLLHLEKKHGEDWGKVYDEAWERIDKKVEGLSKHIKLEEERRSEDAQSKAALTDWLRAKASFVIEGLKEADKDEFCRCELKLQKWYGDLRGKPFAIEAENSILDISGFSKQYNCAFIWQKDGVKKLNLYLIINYFKGGKLRFKKIKPEAFEANRFYTVINKKSGEIVPMEVNFNFDDPNLIILPLAFGKRQGREFIWNDLLSLETGSLKLANGRVIEKTLYNRRTRQDEPALFVALTFERREVLDSSNIKPMNLIGVDRGENIPAVIALTDPEGCPLSRFKDSLGNPTHILRIGESYKEKQRTIQAKKEVEQRRAGGYSRKYASKAKNLADDMVRNTARDLLYYAVTQDAMLIFENLSRGFGRQGKRTFMAERQYTRMEDWLTAKLAYEGLPSKTYLSKTLAQYTSKTCSNCGFTITSADYDRVLEKLKKTATGWMTTINGKELKVEGQITYYNRYKRQNVVKDLSVELDRLSEESVNNDISSWTKGRSGEALSLLKKRFSHRPVQEKFVCLNCGFETHADEQAALNIARSWLFLRSQEYKKYQTNKTTGNTDKRAFVETWQSFYRKKLKEVWKPAV

SEQ ID NO: 40179 - protein, 979 aa, Artificial Sequence
  CasX variant
QEIKRINKIRRRLVKDSNTKKAGKTRGPMKTLLVRVMTPDLRERLENLRKKPENIPQPISNTSRANLNKLLTDYTEMKKAILHVYWEEFQKDPVGLMSRVAQPASKKIDQNKLKPEMDEKGNLTTAGFACSQCGQPLFVYKLEQVSEKGKAYTNYFGRCNVAEHEKLIKLAQLKPEKDSDEAVTYSLGKFGQRALDFYSIHVTKESTHPVKPLAQIAGNRYASHPVGKALSGACMGTIASFLSKYQDIIIEHQKVVKGNQKRLESLRELAGKENLEYPSVTLPPQPHTKEGVDAYNEVIARVRMWVNLNLWQKLKLSRDDAKPLLRLKGFPSFPLVERQANEVDWWDMVCNVKKLINEKKEDGKVFWQNLAGYKRQEALRPYLSSEEDRKKGKKFARYQLGDLLLHLEKKHGEDWGKVYDEAWERIDKKVEGLSKHIKLEEERRSEDAQSKAALTDWLRAKASFVIEGLKEADKDEFCRCELKLQKWYGDLRGKPFAIEAENSILDISGFSKQYNCAFIWQKDGVKKLNLYLIINYFKGGKLRFKKIKPEAFEANRFYTVINKKSGEIVPMEVNFNFDDPNLIILPLAFGKRQGREFIWNDLLSLETGSLKLANGRVIEKTLYNRRTRQDEPALFVALTFERREVLDSSNIKPMNLIGVDRGENIPAVIALTDPEGCPLSRFKDSLGNPTHILRIGESYKEKQRTIQAKKEVEQRRAGGYSRKYASKAKNLADDMVRNTARDLLYYAVTQDAMLIFENLSRGFGRQGKRTFMAERQYTRMEDWLTAKLAYEGLPSKTYLSKTLAQYTSKTCSNCGFTITSADYDRVLEKLKKTATGWMTTINGKELKVEGQITYYNRYKRQNVVKDLSVELDRLSEESVNNDISSWTKGRSGEALSLLKKRFSHRPVQEKFVCLNCGFETHADEQAALNIARSWLFLRSQEYKKYQTNKTTGNTDKRAFVETWQSFYRKKLKEVWKPAV

SEQ ID NO: 40180 - protein, 979 aa, Artificial Sequence; identical to SEQ ID NO: 40028
  CasX variant

SEQ ID NO: 40181 - protein, 979 aa, Artificial Sequence
  CasX variant
QEIKRINKIRRRLVKDSNTKKAGKTRGPMKTLLVRVMTPDLRERLENLRKKPENIPQPISNTSRANLNKLLTDYTEMKKAILHVYWEEFQKDPVGLMSRVAQPASKKIDQNKLKPEMDEKGNLTTAGFACSQCGQPLFVYKLEQVSEKGKAYTNYFGRCNVAEHEKLILLAQLKPEKDSDEAVTYSLGKFGQRALDFYSIHVTKESTHPVKPLAQIAGNRYASHPVGKALSDACMGTIASFLSKYQDIIIEHQKVVKGNQKRLESLRELAGKENLEYPSVTLPPQPHTKEGVDAYNEVIARVRMWVNLNLWQKLKLSRDDAKPLLRLKGFPSFPLVERQANEVDWWDMVCNVKKLINEKKEDGKVFWQNLAGYKRQEALRPYLSSEEDRKKGKKFARYQLGDLLLHLEKKHGEDWGKVYDEAWERIDKKVEGLSKHIKLEEERRSEDAQSKAALTDWLRAKASFVIEGLKEADKDEFCRCELKLQKWYGDLRGKPFAIEAENSILDISGFSKQYNCAFIWQKDGVKKLNLYLIINYFKGGKLRFKKIKPEAFEANRFYTVINKKSGEIVPMEVNFNFDDPNLIILPLAFGKRQGREFIWNDLLSLETGSLKLANGRVIEKTLYNRRTRQDEPALFVALTFERREVLDSSNIKPMNLIGVDRGENIPAVIALTDPEGCPLSRFKDSLGNPTHILRIGESYKEKQRTIQAKKEVEQRRAGGYSRKYASKAKNLADDMVRNTARDLLYYAVTQDAMLIFENLSRGFGRQGKRTFMAERQYTRMEDWLTAKLAYEGLPSKTYLSKTLAQYTSKTCSNCGFTITSADYDRVLEKLKKTATGWMTTINGKELKVEGQITYYNRYKRQNVVKDLSVELDRLSEESVNNDISSWTKGRSGEALSLLKKRFSHRPVQEKFVCLNCGFETHADEQAALNIARSWLFLRSQEYKKYQTNKTTGNTDKRAFVETWQSFYRKKLKEVWKPAV

SEQ ID NO: 40182 - protein, 978 aa, Artificial Sequence; identical to SEQ ID NO: 40077
  CasX variant

SEQ ID NO: 40183 - protein, 978 aa, Artificial Sequence
  CasX variant
QEIKRINKIRRRLVKDSNTKKAGKTGPMKTLLVRVMTPDLRERLENLRKKPENIPQPISNTSRANLNKLLTDYTEMKKAILHVYWEEFQKDPVGLMSRVAQPASKKIDQNKLKPEMDEKGNLTTAGFACSQCGQPLFVYKLEQVSEKGKAYTNYFGRCNVAEHEKLIKLAQLKPEKDSDEAVTYSLGKFGQRALDFYSIHVTKESTHPVKPLAQIAGNRYASYPVGKALSDACMGTIASFLSKYQDIIIEHQKVVKGNQKRLESLRELAGKENLEYPSVTLPPQPHTKEGVDAYNEVIARVRMWVNLNLWQKLKLSRDDAKPLLRLKGFPSFPLVERQANEVDWWDMVCNVKKLINEKKEDGKVFWQNLAGYKRQEALRPYLSSEEDRKKGKKFARYQLGDLLLHLEKKHGEDWGKVYDEAWERIDKKVEGLSKHIKLEEERRSEDAQSKAALTDWLRAKASFVIEGLKEADKDEFCRCELKLQKWYGDLRGKPFAIEAENSILDISGFSKQYNCAFIWQKDGVKKLNLYLIINYFKGGKLRFKKIKPEAFEANRFYTVINKKSGEIVPMEVNFNFDDPNLIILPLAFGKRQGREFIWNDLLSLETGSLKLANGRVIEKTLYNRRTRQDEPALFVALTFERREVLDSSNIKPMNLIGVDRGENIPAVIALTDPEGCPLSRFKDSLGNPTHILRIGESYKEKQRTIQAKKEVEQRRAGGYSRKYASKAKNLADDMVRNTARDLLYYAVTQDAMLIFENLSRGFGRQGKRTFMAERQYTRMEDWLTAKLAYEGLPSKTYLSKTLAQYTSKTCSNCGFTITSADYDRVLEKLKKTATGWMTTINGKELKVEGQITYYNRYKRQNVVKDLSVELDRLSEESVNNDISSWTKGRSGEALSLLKKRFSHRPVQEKFVCLNCGFETHADEQAALNIARSWLFLRSQEYKKYQTNKTTGNTDKRAFVETWQSFYRKKLKEVWKPAV

SEQ ID NO: 40184 - protein, 978 aa, Artificial Sequence
  CasX variant
QEIKRINKIRRRLVKDSNTKKAGKTGPMKTLLVRVMTPDLRERLENLRKKPENIPQPISNTSRANLNKLLTDYTEMKKAILHVYWEEFQKDPVGLMSRVAQPASKKIDQNKLKPEMDEKGNLTTAGFACSQCGQPLFVYKLEQVSEKGKAYTNYFGRCNVAEHEKLIKLAQLKPEKDSDEAVTYSLGKFGQRALDFYSIHVTKESTHPVKPLAQIAGNRYASHPVGKALSDACMGTIASFLSKYQDIIIEHQKVVKGNQKRLESLRELAGKENLEYPSVTLPPQPHTKEGVDAYNEVIARVRMWVNLNLWQKLKLSRDDAKPLLRLKGFPSFPLVERQANEVDWWDMVCNVKKLINEKKEDGKVFWQNLAGYKRQEALRPYLSSEEDRKKGKKFARYQLGDLLLHLEKKHGEDWGKVYDEAWERIDKKVEGLSKHIKLEEERRSEDAQSKAALTDWLRAKASFVIEGLKEADKDEFCRCELKLQKWYGDLRGKPFAIEAENSILDISGFSKQYNCAFIWQKDGVKKLNLYLIINYFKGGKLRFKKIKPEAFEANRFYTVINKKSGEIVPMEVNFNFDDPNLIILPLAFGKRQGREFIWNDLLSLETGSLKLANGRVIEKTLYNRRTRQDEPALFVALTFERREVLDSSNIKPMNLIGVDRGENIPAVIALTDPEGCPLSRFKDSLGNPTHILRIGESYKEKQRTIQAKKEVEQRRAGGYSRKYASKAKNLADDMVRNTARDLLYYAVTQDAMLIFENLSRGFGRQGKRTFMAERQYTRMEDWLTAKLAYEGLPSKTYLSKTLAQYTSKTCSNCGFTITSADYDRVLEKLKKTATGWMTTINGKELKVEGQITYYNRYKRQNVVKDLSVELDRLSEESVNNDISSWTKGRSGEALSLLKKRFSHRPVQEKFVCLNCGFETHADEQAALNIARSWLFLRSQEYKKYQTNKTTGNTDKRAFVETWQSFYRKKLKEVWKPAV

SEQ ID NO: 40185 - protein, 979 aa, Artificial Sequence
  CasX variant
QEIKRINKIRRRLVKDSNTKKAGKTRGPMKTLLVRVMTPDLRERLENLRKKPENIPQPISNTSRANLNKLLTDYTEMKKAILHVYWEEFQKDPVGLMSRVAQPASKKIDQNKLKPEMDEKGNLTTAGFACSQCGQPLFVYKLEQVSEKGKAYTNYFGRCNVAEHEKLIKLAQLKPEKDSDEAVTYSLGKFGQRALDFYSIHVTKESTHPVKPLAQIAGNRYASYPVGKALSDACMGTIASFLSKYQDIIIEHQKVVKGNQKRLESLRELAGKENLEYPSVTLPPQPHTKEGVDAYNEVIARVRMWVNLNLWQKLKLSRDDAKPLLRLKGFPSFPLVERQANEVDWWDMVCNVKKLINEKKEDGKVFWQNLAGYKRQEALRPYLSSEEDRKKGKKFARYQLGDLLLHLEKKHGEDWGKVYDEAWERIDKKVEGLSKHIKLEEERRSEDAQSKAALTDWLRAKASFVIEGLKEADKDEFCRCELKLQKWYGDLRGKPFAIEAENSILDISGFSKQYNCAFIWQKDGVKKLNLYLIINYFKGGKLRFKKIKPEAFEANRFYTVINKKSGEIVPMEVNFNFDDPNLIILPLAFGKRQGREFIWNDLLSLETGSLKLANGRVIEKTLYNRRTRQDEPALFVALTFERREVLDSSNIKPMNLIGVDRGENIPAVIALTDPEGCPLSRFKDSLGNPTHILRIGESYKEKQRTIQAKKEVEQRRAGGYSRKYASKAKNLADDMVRNTARDLLYYAVTQDAMLIFENLSRGFGRQGKRTFMAERQYTRMEDWLTAKLAYEGLPSKTYLSKTLAQYTSKTCSNCGFTITSADYDRVLEKLKKTATGWMTTINGKELKVEGQITYYNRYKRQNVVKDLSVELDRLSEESVNNDISSWTKGRSGEALSLLKKRFSHRPVQEKFVCLNCGFETHADEQAALNIARSWLFLRSQEYKKYQTNKTTGNTDKRAFVETWQSFYRKKLKEVWKPAV

SEQ ID NO: 40186 - protein, 979 aa, Artificial Sequence
  CasX variant
QEIKRINKIRRRLVKDSNTKKAGKTRGPMKTLLVRVMTPDLRERLENLRKKPENIPQPISNTSRANLNKLLTDYTEMKKAILHVYWEEFQKDPVGLMSRVAQPASKKIDQNKLKPEMDEKGNLTTAGFACSQCGQPLFVYKLEQVSEKGKAYTNYFGRCNVAEHEKLIKLAQLKPEKDSDEAVTYSLGKFGQRALDFYSIHVTKESTHPVKPLAQIAGNRYASHPVGKALSDACMGTIASFLSKYQDIIIEHQKVVKGNQKRLESLRELAGKENLEYPSVTLPPQPHTKEGVDAYNEVIARVRMWVNLNLWQKLKLSRDDAKPLLRLKGFPSFPLVERQANEVDWWDMVCNVKKLINEKKEDGKVFWQNLAGYKRQEALRPYLSSEEDRKKGKKFARYQLGDLLLHLEKKHGEDWGKVYDEAWERIDKKVEGLSKHIKLEEERRSEDAQSKAALTDWLRAKASFVIEGLKEADKDEFCRCELKLQKWYGDLRGKPFAIEAENSILDISGFSKQYNCAFIWQKDGVKKLNLYLIINYFKGGKLRFKKIKPEAFEANRFYTVINKKSGEIVPMEVNFNFDDPNLIILPLAFGKRQGREFIWNDLLSLETGSLKLANGRVIEKTLYNRRTRQDEPALFVALTFERREVLDSSNIKPMNLIGVDRGENIPAVIALTDPEGCPLSRFKDSLGNPTHILRIGESYKEKQRTIQAKKEVEQRRAGGYSRKYASKAKNLADDMVRNTARDLLYYAVTQDAMLIFENLSRGFGRQGKRTFMAERQYTRMEDWLTAKLAYEGLPSKTYLSKTLAQYTSKTCSNCGFTITSADYDRVLEKLKKTATGWMTTINGKELKVEGQITYYNRYKRQNVVKDLSVELDRLSEESVNNDISSWTKGRSGEALSLLKKRFSHRPVQEKFVCLNCGFETHADEQAALNIARSWLFLRSQEYKKYQTNKTTGNTDKRAFVETWQSFYRKKLKEVWKPAV

SEQ ID NO: 40187 - protein, 978 aa, Artificial Sequence
  CasX variant
QEIKRINKIRRRLVKDSNTKKAGKTGPMKTLLVRVMTPDLRERLENLRKKPENIPQPISNTSRANLNKLLTDYTEMKKAILHVYWEEFQKDPVGLMSRVAQPASKKIDQNKLKPEMDEKGNLTTAGFACSQCGQPLFVYKLEQVSEKGKAYTNYFGRCNVAEHEKLIKLAQLKPEKDSDEAVTYSLGKFGQRALDFYSIHVTKESTHPVKPLAQIAGNRYASHPVGKALSGACMGTIASFLSKYQDIIIEHQKVVKGNQKRLESLRELAGKENLEYPSVTLPPQPHTKEGVDAYNEVIARVRMWVNLNLWQKLKLSRDDAKPLLRLKGFPSFPLVERQANEVDWWDMVCNVKKLINEKKEDGKVFWQNLAGYKRQEALRPYLSSEEDRKKGKKFARYQLGDLLLHLEKKHGEDWGKVYDEAWERIDKKVEGLSKHIKLEEERRSEDAQSKAALTDWLRAKASFVIEGLKEADKDEFCRCELKLQKWYGDLRGKPFAIEAENSILDISGFSKQYNCAFIWQKDGVKKLNLYLIINYFKGGKLRFKKIKPEAFEANRFYTVINKKSGEIVPMEVNFNFDDPNLIILPLAFGKRQGREFIWNDLLSLETGSLKLANGRVIEKTLYNRRTRQDEPALFVALTFERREVLDSSNIKPMNLIGVDRGENIPAVIALTDPEGCPLSRFKDSLGNPTHILRIGESYKEKQRTIQAKKEVEQRRAGGYSRKYASKAKNLADDMVRNTARDLLYYAVTQDAMLIFENLSRGFGRQGKRTFMAERQYTRMEDWLTAKLAYEGLPSKTYLSKTLAQYTSKTCSNCGFTITSADYDRVLEKLKKTATGWMTTINGKELKVEGQITYYNRYKRQNVVKDLSVELDRLSEESVNNDISSWTKGRSGEALSLLKKRFSHRPVQEKFVCLNCGFETHADEQAALNIARSWLFLRSQEYKKYQTNKTTGNTDKRAFVETWQSFYRKKLKEVWKPAV

SEQ ID NO: 40188 - protein, 11 aa, Artificial Sequence
  nuclear localization signal
PAKRARRGYKC

SEQ ID NO: 40189 - protein, 11 aa, Artificial Sequence
  nuclear localization signal
KLGPRKATGRW

SEQ ID NO: 40190 - protein, 7 aa, Artificial Sequence
  nuclear localization signal
PRRKREE

SEQ ID NO: 40191 - protein, 7 aa, Artificial Sequence
  nuclear localization signal
PYRGRKE

SEQ ID NO: 40192 - protein, 8 aa, Artificial Sequence
  nuclear localization signal
PLRKRPRR

SEQ ID NO: 40193 - protein, 18 aa, Artificial Sequence
  nuclear localization signal
PLRKRPRRGSPLRKRPRR

SEQ ID NO: 40194 - protein, 29 aa, Artificial Sequence
  nuclear localization signal
PAAKRVKLDGGKRTADGSEFESPKKKRKV

SEQ ID NO: 40195 - protein, 37 aa, Artificial Sequence
  nuclear localization signal
PAAKRVKLDGGKRTADGSEFESPKKKRKVGIHGVPAA

SEQ ID NO: 40196 - protein, 46 aa, Artificial Sequence
  nuclear localization signal
PAAKRVKLDGGKRTADGSEFESPKKKRKVAEAAAKEAAAKEAAAKA

SEQ ID NO: 40197 - protein, 31 aa, Artificial Sequence
  nuclear localization signal
PAAKRVKLDGGKRTADGSEFESPKKKRKVPG

SEQ ID NO: 40198 - protein, 15 aa, Artificial Sequence
  nuclear localization signal
KRKGSPERGERKRHW

SEQ ID NO: 40199 - protein, 28 aa, Artificial Sequence
  nuclear localization signal
KRTADSQHSTPPKTKRKVEFEPKKKRKV

SEQ ID NO: 40200 - protein, 38 aa, Artificial Sequence
  nuclear localization signal
PKKKRKVGGSKRTADSQHSTPPKTKRKVEFEPKKKRKV

SEQ ID NO: 40201 - protein, 5 aa, Artificial Sequence
  Linker
  SITE (2)..(5): individual amino acid residues may be present or absent
GGGGG

SEQ ID NO: 40202 - protein, 10 aa, Artificial Sequence
  Linker
  SITE (3)..(4): grouped amino acid residues may be present or absent
  SITE (5)..(6): grouped amino acid residues may be present or absent
  SITE (7)..(8): grouped amino acid residues may be present or absent
  SITE (9)..(10): grouped amino acid residues may be present or absent
GSGSGSGSGS

SEQ ID NO: 40203 - protein, 23 aa, Artificial Sequence
  Linker
  SITE (8)..(11): grouped amino acid residues may be present or absent
  SITE (12)..(15): grouped amino acid residues may be present or absent
  SITE (16)..(19): grouped amino acid residues may be present or absent
  SITE (20)..(23): grouped amino acid residues may be present or absent
PPPGGGSGGGSGGGSGGGSGGGS

SEQ ID NO: 40204 - protein, 23 aa, Artificial Sequence
  Linker
  SITE (1)..(4): grouped amino acid residues may be present or absent
  SITE (5)..(8): grouped amino acid residues may be present or absent
  SITE (9)..(12): grouped amino acid residues may be present or absent
  SITE (13)..(16): grouped amino acid residues may be present or absent
GGGSGGGSGGGSGGGSGGGSPPP

SEQ ID NO: 40205 - protein, 17 aa, Artificial Sequence
  Linker
AEAAAKEAAAKEAAAKA

SEQ ID NO: 40206 - protein, 12 aa, Artificial Sequence
  Linker
TPPKTKRKVEFE

SEQ ID NO: 40207 - protein, 4 aa, Artificial Sequence
  Linker
PPPG

SEQ ID NO: 40208 - protein, 979 aa, Artificial Sequence; identical to SEQ ID NO: 40027
  CasX variant

SEQ ID NO: 40209 - protein, 979 aa, Artificial Sequence; identical to SEQ ID NO: 40028
  CasX variant

SEQ ID NO: 40210 - protein, 978 aa, Artificial Sequence
  CasX variant
QEIKRINKIRRRLVKDSNTKKAGKTGPMKTLLVRVMTPDLRERLENLRKKPENIPQPISNTSRANLNKLLTDYTEMKKAILHVYWEEFQKDPVGLMSRVAQPASKKIDQNKLKPEMDEKGNLTTAGFACSQCGQPLFVYKLEQVSEKGKAYTNYFGRCNVAEHEKLILLAQLKPEKDSDEAVTYSLGKFGQRALDFYSIHVTKESTHPVKPLAQIAGNRYASHPVGKALSDACMGTIASFLSKYQDIIIEHQKVVKGNQKRLESLRELAGKENLEYPSVTLPPQPHTKEGVDAYNEVIARVRMWVNLNLWQKLKLSRDDAKPLLRLKGFPSFPLVERQANEVDWWDMVCNVKKLINEKKEDGKVFWQNLAGYKRQEALRPYLSSEEDRKKGKKFARYQLGDLLLHLEKKHGEDWGKVYDEAWERIDKKVEGLSKHIKLEEERRSEDAQSKAALTDWLRAKASFVIEGLKEADKDEFCRCELKLQKWYGDLRGKPFAIEAENSILDISGFSKQYNCAFIWQKDGVKKLNLYLIINYFKGGKLRFKKIKPEAFEANRFYTVINKKSGEIVPMEVNFNFDDPNLIILPLAFGKRQGREFIWNDLLSLETGSLKLANGRVIEKTLYNRRTRQDEPALFVALTFERREVLDSSNIKPMNLIGVDRGENIPAVIALTDPEGCPLSRFKDSLGNPTHILRIGESYKEKQRTIQAKKEVEQRRAGGYSRKYASKAKNLADDMVRNTARDLLYYAVTQDAMLIFENLSRGFGRQGKRTFMAERQYTRMEDWLTAKLAYEGLPSKTYLSKTLAQYTSKTCSNCGFTITSADYDRVLEKLKKTATGWMTTINGKELKVEGQITYYNRYKRQNVVKDLSVELDRLSEESVNNDISSWTKGRSGEALSLLKKRFSHRPVQEKFVCLNCGFETHADEQAALNIARSWLFLRSQEYKKYQTNKTTGNTDKRAFVETWQSFYRKKLKEVWKPAV

SEQ ID NO: 40211 - protein, 978 aa, Artificial Sequence; identical to SEQ ID NO: 40030
  CasX variant

SEQ ID NO: 40212 - protein, 978 aa, Artificial Sequence; identical to SEQ ID NO: 40031
  CasX variant

SEQ ID NO: 40213 - protein, 978 aa, Artificial Sequence; identical to SEQ ID NO: 40032
  CasX variant

SEQ ID NO: 40214 - protein, 978 aa, Artificial Sequence; identical to SEQ ID NO: 40033
  CasX variant

SEQ ID NO: 40215 - protein, 978 aa, Artificial Sequence; identical to SEQ ID NO: 40034
  CasX variant

SEQ ID NO: 40216 - protein, 978 aa, Artificial Sequence; identical to SEQ ID NO: 40035
  CasX variant

SEQ ID NO: 40217 - protein, 978 aa, Artificial Sequence; identical to SEQ ID NO: 40036
  CasX variant

SEQ ID NO: 40218 - protein, 978 aa, Artificial Sequence; identical to SEQ ID NO: 40037
  CasX variant

SEQ ID NO: 40219 - protein, 978 aa, Artificial Sequence; identical to SEQ ID NO: 40038
  CasX variant

SEQ ID NO: 40220 - protein, 978 aa, Artificial Sequence; identical to SEQ ID NO: 40039
  CasX variant

SEQ ID NO: 40221 - protein, 978 aa, Artificial Sequence; identical to SEQ ID NO: 40040
  CasX variant

SEQ ID NO: 40222 - protein, 978 aa, Artificial Sequence; identical to SEQ ID NO: 40041
  CasX variant

SEQ ID NO: 40223 - protein, 978 aa, Artificial Sequence; identical to SEQ ID NO: 40042
  CasX variant

SEQ ID NO: 40224 - protein, 979 aa, Artificial Sequence; identical to SEQ ID NO: 40043
  CasX variant

SEQ ID NO: 40225 - protein, 978 aa, Artificial Sequence; identical to SEQ ID NO: 40044
  CasX variant

SEQ ID NO: 40226 - protein, 979 aa, Artificial Sequence; identical to SEQ ID NO: 40045
  CasX variant

SEQ ID NO: 40227 - protein, 979 aa, Artificial Sequence; identical to SEQ ID NO: 40046
  CasX variant

SEQ ID NO: 40228 - protein, 978 aa, Artificial Sequence; identical to SEQ ID NO: 40047
  CasX variant

SEQ ID NO: 40229 - protein, 978 aa, Artificial Sequence; identical to SEQ ID NO: 40048
  CasX variant

SEQ ID NO: 40230 - protein, 978 aa, Artificial Sequence; identical to SEQ ID NO: 40049
  CasX variant

SEQ ID NO: 40231 - protein, 978 aa, Artificial Sequence; identical to SEQ ID NO: 40050
  CasX variant

SEQ ID NO: 40232 - protein, 978 aa, Artificial Sequence; identical to SEQ ID NO: 40051
  CasX variant

SEQ ID NO: 40233 - protein, 978 aa, Artificial Sequence; identical to SEQ ID NO: 40052
  CasX variant

SEQ ID NO: 40234 - protein, 978 aa, Artificial Sequence; identical to SEQ ID NO: 40053
  CasX variant

SEQ ID NO: 40235 - protein, 978 aa, Artificial Sequence; identical to SEQ ID NO: 40054
  CasX variant

SEQ ID NO: 40236 - protein, 979 aa, Artificial Sequence; identical to SEQ ID NO: 40055
  CasX variant

SEQ ID NO: 40237 - protein, 978 aa, Artificial Sequence; identical to SEQ ID NO: 40056
  CasX variant

SEQ ID NO: 40238 - protein, 978 aa, Artificial Sequence; identical to SEQ ID NO: 40057
  CasX variant

SEQ ID NO: 40239 - protein, 979 aa, Artificial Sequence; identical to SEQ ID NO: 40058
  CasX variant

SEQ ID NO: 40240 - protein, 978 aa, Artificial Sequence; identical to SEQ ID NO: 40059
  CasX variant

SEQ ID NO: 40241 - protein, 978 aa, Artificial Sequence; identical to SEQ ID NO: 40060
  CasX variant

SEQ ID NO: 40242 - protein, 979 aa, Artificial Sequence; identical to SEQ ID NO: 40061
  CasX variant

SEQ ID NO: 40243 - protein, 978 aa, Artificial Sequence; identical to SEQ ID NO: 40062
  CasX variant

SEQ ID NO: 40244 - protein, 978 aa, Artificial Sequence; identical to SEQ ID NO: 40063
  CasX variant

SEQ ID NO: 40245 - protein, 979 aa, Artificial Sequence; identical to SEQ ID NO: 40064
  CasX variant

SEQ ID NO: 40246 - protein, 979 aa, Artificial Sequence; identical to SEQ ID NO: 40064
  CasX variant

SEQ ID NO: 40247 - protein, 979 aa, Artificial Sequence; identical to SEQ ID NO: 40065
  CasX variant

SEQ ID NO: 40248 - protein, 978 aa, Artificial Sequence; identical to SEQ ID NO: 40066
  CasX variant

SEQ ID NO: 40249 - protein, 978 aa, Artificial Sequence; identical to SEQ ID NO: 40067
  CasX variant

SEQ ID NO: 40250 - protein, 979 aa, Artificial Sequence; identical to SEQ ID NO: 40068
  CasX variant

SEQ ID NO: 40251 - protein, 978 aa, Artificial Sequence; identical to SEQ ID NO: 40069
  CasX variant

SEQ ID NO: 40252 - protein, 978 aa, Artificial Sequence; identical to SEQ ID NO: 40070
  CasX variant

SEQ ID NO: 40253 - protein, 978 aa, Artificial Sequence; identical to SEQ ID NO: 40071
  CasX variant

SEQ ID NO: 40254 - protein, 978 aa, Artificial Sequence; identical to SEQ ID NO: 40072
  CasX variant

SEQ ID NO: 40255 - protein, 978 aa, Artificial Sequence; identical to SEQ ID NO: 40073
  CasX variant

SEQ ID NO: 40256 - protein, 978 aa, Artificial Sequence; identical to SEQ ID NO: 40074
  CasX variant

SEQ ID NO: 40257 - protein, 978 aa, Artificial Sequence; identical to SEQ ID NO: 40075
  CasX variant

SEQ ID NO: 40258 - protein, 978 aa, Artificial Sequence; identical to SEQ ID NO: 40076
  CasX variant

SEQ ID NO: 40259 - protein, 978 aa, Artificial Sequence; identical to SEQ ID NO: 40077
  CasX variant

SEQ ID NO: 40260 - protein, 978 aa, Artificial Sequence; identical to SEQ ID NO: 40078
  CasX variant

SEQ ID NO: 40261 - protein, 978 aa, Artificial Sequence; identical to SEQ ID NO: 40079
  CasX variant

SEQ ID NO: 40262 - protein, 978 aa, Artificial Sequence; identical to SEQ ID NO: 40080
  CasX variant

SEQ ID NO: 40263 - protein, 977 aa, Artificial Sequence; identical to SEQ ID NO: 40081
  CasX variant

SEQ ID NO: 40264 - protein, 978 aa, Artificial Sequence; identical to SEQ ID NO: 40030
  CasX variant

SEQ ID NO: 40265 - protein, 978 aa, Artificial Sequence; identical to SEQ ID NO: 40083
  CasX variant

SEQ ID NO: 40266 - protein, 978 aa, Artificial Sequence; identical to SEQ ID NO: 40084
  CasX variant

SEQ ID NO: 40267 - protein, 978 aa, Artificial Sequence; identical to SEQ ID NO: 40085
  CasX variant

SEQ ID NO: 40268 - protein, 978 aa, Artificial Sequence; identical to SEQ ID NO: 40086
  CasX variant

SEQ ID NO: 40269 - protein, 978 aa, Artificial Sequence; identical to SEQ ID NO: 40087
  CasX variant

SEQ ID NO: 40270 - protein, 978 aa, Artificial Sequence; identical to SEQ ID NO: 40088
  CasX variant

SEQ ID NO: 40271 - protein, 978 aa, Artificial Sequence; identical to SEQ ID NO: 40089
  CasX variant

SEQ ID NO: 40272 - protein, 979 aa, Artificial Sequence; identical to SEQ ID NO: 40090
  CasX variant

SEQ ID NO: 40273 - protein, 977 aa, Artificial Sequence; identical to SEQ ID NO: 40091
  CasX variant

SEQ ID NO: 40274 - protein, 978 aa, Artificial Sequence; identical to SEQ ID NO: 40092
  CasX variant

SEQ ID NO: 40275 - protein, 977 aa, Artificial Sequence; identical to SEQ ID NO: 40093
  CasX variant

SEQ ID NO: 40276 - protein, 978 aa, Artificial Sequence; identical to SEQ ID NO: 40094
  CasX variant

SEQ ID NO: 40277 - protein, 978 aa, Artificial Sequence; identical to SEQ ID NO: 40095
  CasX variant

SEQ ID NO: 40278 - protein, 979 aa, Artificial Sequence; identical to SEQ ID NO: 40096
  CasX variant

SEQ ID NO: 40279 - protein, 979 aa, Artificial Sequence; identical to SEQ ID NO: 40097
  CasX variant

SEQ ID NO: 40280 - protein, 979 aa, Artificial Sequence; identical to SEQ ID NO: 40098
  CasX variant

SEQ ID NO: 40281 - protein, 979 aa, Artificial Sequence; identical to SEQ ID NO: 40099
  CasX variant

SEQ ID NO: 40282 - protein, 979 aa, Artificial Sequence; identical to SEQ ID NO: 40100
  CasX variant

SEQ ID NO: 40283 - protein, 978 aa, Artificial Sequence; identical to SEQ ID NO: 40101
  CasX variant

SEQ ID NO: 40284 - protein, 978 aa, Artificial Sequence; identical to SEQ ID NO: 40102
  CasX variant

SEQ ID NO: 40285 - protein, 978 aa, Artificial Sequence; identical to SEQ ID NO: 40103
  CasX variant

SEQ ID NO: 40286 - protein, 978 aa, Artificial Sequence; identical to SEQ ID NO: 40104
  CasX variant

SEQ ID NO: 40287 - protein, 978 aa, Artificial Sequence; identical to SEQ ID NO: 40105
  CasX variant

SEQ ID NO: 40288 - protein, 978 aa, Artificial Sequence; identical to SEQ ID NO: 40106
  CasX variant

SEQ ID NO: 40289 - protein, 979 aa, Artificial Sequence; identical to SEQ ID NO: 40107
  CasX variant

SEQ ID NO: 40290 - protein, 979 aa, Artificial Sequence; identical to SEQ ID NO: 40108
  CasX variant

SEQ ID NO: 40291 - protein, 979 aa, Artificial Sequence; identical to SEQ ID NO: 40109
  CasX variant

SEQ ID NO: 40292 - protein, 979 aa, Artificial Sequence; identical to SEQ ID NO: 40110
  CasX variant

SEQ ID NO: 40293 - protein, 979 aa, Artificial Sequence; identical to SEQ ID NO: 40111
  CasX variant

SEQ ID NO: 40294 - protein, 978 aa, Artificial Sequence; identical to SEQ ID NO: 40112
  CasX variant

SEQ ID NO: 40295 - protein, 978 aa, Artificial Sequence; identical to SEQ ID NO: 40113
  CasX variant

SEQ ID NO: 40296 - protein, 978 aa, Artificial Sequence; identical to SEQ ID NO: 40114
  CasX variant

SEQ ID NO: 40297 - protein, 978 aa, Artificial Sequence; identical to SEQ ID NO: 40115
  CasX variant

SEQ ID NO: 40298 - protein, 978 aa, Artificial Sequence; identical to SEQ ID NO: 40116
  CasX variant

SEQ ID NO: 40299 - protein, 978 aa, Artificial Sequence; identical to SEQ ID NO: 40117
  CasX variant

SEQ ID NO: 40300 - protein, 978 aa, Artificial Sequence; identical to SEQ ID NO: 40118
  CasX variant

SEQ ID NO: 40301 - protein, 978 aa, Artificial Sequence; identical to SEQ ID NO: 40119
  CasX variant

SEQ ID NO: 40302 - protein, 978 aa, Artificial Sequence; identical to SEQ ID NO: 40120
  CasX variant

SEQ ID NO: 40303 - protein, 978 aa, Artificial Sequence; identical to SEQ ID NO: 40121
  CasX variant

SEQ ID NO: 40304 - protein, 978 aa, Artificial Sequence; identical to SEQ ID NO: 40122
  CasX variant

SEQ ID NO: 40305 - protein, 979 aa, Artificial Sequence; identical to SEQ ID NO: 40123
  CasX variant

SEQ ID NO: 40306 - protein, 979 aa, Artificial Sequence; identical to SEQ ID NO: 40124
  CasX variant

SEQ ID NO: 40307 - protein, 978 aa, Artificial Sequence; identical to SEQ ID NO: 40125
  CasX variant

SEQ ID NO: 40308 - protein, 978 aa, Artificial Sequence; identical to SEQ ID NO: 40126
  CasX variant

SEQ ID NO: 40309 - protein, 979 aa, Artificial Sequence; identical to SEQ ID NO: 40127
  CasX variant

SEQ ID NO: 40310 - protein, 979 aa, Artificial Sequence; identical to SEQ ID NO: 40128
  CasX variant

SEQ ID NO: 40311 - protein, 978 aa, Artificial Sequence; identical to SEQ ID NO: 40129
  CasX variant

SEQ ID NO: 40312 - protein, 978 aa, Artificial Sequence; identical to SEQ ID NO: 40130
  CasX variant

SEQ ID NO: 40313 - protein, 979 aa, Artificial Sequence; identical to SEQ ID NO: 40131
  CasX variant

SEQ ID NO: 40314 - protein, 978 aa, Artificial Sequence; identical to SEQ ID NO: 40132
  CasX variant

SEQ ID NO: 40315 - protein, 978 aa, Artificial Sequence; identical to SEQ ID NO: 40133
  CasX variant

SEQ ID NO: 40316 - protein, 978 aa, Artificial Sequence; identical to SEQ ID NO: 40134
  CasX variant

SEQ ID NO: 40317 - protein, 978 aa, Artificial Sequence; identical to SEQ ID NO: 40135
  CasX variant

SEQ ID NO: 40318 - protein, 978 aa, Artificial Sequence; identical to SEQ ID NO: 40048
  CasX variant

SEQ ID NO: 40319 - protein, 978 aa, Artificial Sequence; identical to SEQ ID NO: 40137
  CasX variant

SEQ ID NO: 40320 - protein, 978 aa, Artificial Sequence; identical to SEQ ID NO: 40138
  CasX variant

SEQ ID NO: 40321 - protein, 979 aa, Artificial Sequence; identical to SEQ ID NO: 40139
  CasX variant

SEQ ID NO: 40322 - protein, 979 aa, Artificial Sequence; identical to SEQ ID NO: 40140
  CasX variant

SEQ ID NO: 40323 - protein, 979 aa, Artificial Sequence; identical to SEQ ID NO: 40141
  CasX variant

SEQ ID NO: 40324 - protein, 979 aa, Artificial Sequence; identical to SEQ ID NO: 40142
  CasX variant

SEQ ID NO: 40325 - protein, 979 aa, Artificial Sequence; identical to SEQ ID NO: 40143
  CasX variant

SEQ ID NO: 40326 - protein, 978 aa, Artificial Sequence; identical to SEQ ID NO: 40144
  CasX variant

SEQ ID NO: 40327 - protein, 978 aa, Artificial Sequence; identical to SEQ ID NO: 40145
  CasX variant

SEQ ID NO: 40328 - protein, 978 aa, Artificial Sequence; identical to SEQ ID NO: 40146
  CasX variant

SEQ ID NO: 40329 - protein, 978 aa, Artificial Sequence; identical to SEQ ID NO: 40147
  CasX variant

SEQ ID NO: 40330 - protein, 978 aa, Artificial Sequence; identical to SEQ ID NO: 40148
  CasX variant

SEQ ID NO: 40331 - protein, 978 aa, Artificial Sequence; identical to SEQ ID NO: 40149
  CasX variant

SEQ ID NO: 40332 - protein, 978 aa, Artificial Sequence; identical to SEQ ID NO: 40150
  CasX variant

SEQ ID NO: 40333 - protein, 979 aa, Artificial Sequence; identical to SEQ ID NO: 40151
  CasX variant

SEQ ID NO: 40334 - protein, 978 aa, Artificial Sequence; identical to SEQ ID NO: 40152
  CasX variant

SEQ ID NO: 40335 - protein, 978 aa, Artificial Sequence; identical to SEQ ID NO: 40153
  CasX variant

SEQ ID NO: 40336 - protein, 977 aa, Artificial Sequence; identical to SEQ ID NO: 40154
  CasX variant

SEQ ID NO: 40337 - protein, 977 aa, Artificial Sequence; identical to SEQ ID NO: 40155
  CasX variant

SEQ ID NO: 40338 - protein, 977 aa, Artificial Sequence; identical to SEQ ID NO: 40156
  CasX variant

SEQ ID NO: 40339 - protein, 977 aa, Artificial Sequence; identical to SEQ ID NO: 40157
  CasX variant

SEQ ID NO: 40340 - protein, 977 aa, Artificial Sequence; identical to SEQ ID NO: 40158
  CasX variant

SEQ ID NO: 40341 - protein, 978 aa, Artificial Sequence; identical to SEQ ID NO: 40159
  CasX variant

SEQ ID NO: 40342 - protein, 979 aa, Artificial Sequence; identical to SEQ ID NO: 40160
  CasX variant

SEQ ID NO: 40343 - protein, 979 aa, Artificial Sequence; identical to SEQ ID NO: 40161
  CasX variant

SEQ ID NO: 40344 - protein, 979 aa, Artificial Sequence; identical to SEQ ID NO: 40162
  CasX variant

SEQ ID NO: 40345 - protein, 979 aa, Artificial Sequence; identical to SEQ ID NO: 40163
  CasX variant

SEQ ID NO: 40346 - protein, 978 aa, Artificial Sequence; identical to SEQ ID NO: 40164
  CasX variant

SEQ ID NO: 40347 - protein, 978 aa, Artificial Sequence; identical to SEQ ID NO: 40165
  CasX variant

SEQ ID NO: 40348 - protein, 978 aa, Artificial Sequence; identical to SEQ ID NO: 40166
  CasX variant

SEQ ID NO: 40349 - protein, 978 aa, Artificial Sequence; identical to SEQ ID NO: 40167
  CasX variant

SEQ ID NO: 40350 - protein, 979 aa, Artificial Sequence; identical to SEQ ID NO: 40168
  CasX variant

SEQ ID NO: 40351 - protein, 979 aa, Artificial Sequence; identical to SEQ ID NO: 40169
  CasX variant

SEQ ID NO: 40352 - protein, 979 aa, Artificial Sequence; identical to SEQ ID NO: 40170
  CasX variant

SEQ ID NO: 40353 - protein, 978 aa, Artificial Sequence; identical to SEQ ID NO: 40171
  CasX variant

SEQ ID NO: 40354 - protein, 978 aa, Artificial Sequence; identical to SEQ ID NO: 40172
  CasX variant

SEQ ID NO: 40355 - protein, 979 aa, Artificial Sequence; identical to SEQ ID NO: 40173
  CasX variant

SEQ ID NO: 40356 - protein, 979 aa, Artificial Sequence; identical to SEQ ID NO: 40174
  CasX variant

SEQ ID NO: 40357 - protein, 978 aa, Artificial Sequence; identical to SEQ ID NO: 40175
  CasX variant

SEQ ID NO: 40358 - protein, 978 aa, Artificial Sequence; identical to SEQ ID NO: 40176
  CasX variant

SEQ ID NO: 40359 - protein, 979 aa, Artificial Sequence; identical to SEQ ID NO: 40177
  CasX variant

SEQ ID NO: 40360 - protein, 979 aa, Artificial Sequence; identical to SEQ ID NO: 40178
  CasX variant

SEQ ID NO: 40361 - protein, 979 aa, Artificial Sequence; identical to SEQ ID NO: 40179
  CasX variant

SEQ ID NO: 40362 - protein, 979 aa, Artificial Sequence; identical to SEQ ID NO: 40028
  CasX variant

SEQ ID NO: 40363 - protein, 979 aa, Artificial Sequence; identical to SEQ ID NO: 40181
  CasX variant

SEQ ID NO: 40364 - protein, 978 aa, Artificial Sequence; identical to SEQ ID NO: 40077
  CasX variant

SEQ ID NO: 40365 - protein, 978 aa, Artificial Sequence; identical to SEQ ID NO: 40183
  CasX variant

SEQ ID NO: 40366 - protein, 978 aa, Artificial Sequence; identical to SEQ ID NO: 40184
  CasX variant

SEQ ID NO: 40367 - protein, 979 aa, Artificial Sequence; identical to SEQ ID NO: 40185
  CasX variant

SEQ ID NO: 40368 - protein, 979 aa, Artificial Sequence; identical to SEQ ID NO: 40186
  CasX variant

SEQ ID NO: 40369 - protein, 978 aa, Artificial Sequence; identical to SEQ ID NO: 40187
  CasX variant

SEQ ID NO: 40370 - DNA, 584 bp, Artificial Sequence
  Promoter variant sequence
gacattgattattgactagttattaatagtaatcaattacggggtcattagttcatagcccatatatggagttccgcgttacataacttacggtaaatggcccgcctggctgaccgcccaacgacccccgcccattgacgtcaataatgacgtatgttcccatagtaacgccaatagggactttccattgacgtcaatgggtggagtatttacggtaaactgcccacttggcagtacatcaagtgtatcatatgccaagtacgccccctattgacgtcaatgacggtaaatggcccgcctggcattatgcccagtacatgaccttatgggactttcctacttggcagtacatctacgtattagtcatcgctattaccatggtgatgcggttttggcagtacatcaatgggcgtggatagcggtttgactcacggggatttccaagtctccaccccattgacgtcaatgggagtttgttttggcaccaaaatcaacgggactttccaaaatgtcgtaacaactccgccccattgacgcaaatgggcggtaggcgtgtacggtgggaggtctatataagcagagct

SEQ ID NO: 40371 - DNA, 400 bp, Artificial Sequence
  Promoter variant sequence
ggcctccgcgccgggttttggcgcctcccgcgggcgcccccctcctcacggcgagcgctgccacgtcagacgaagggcgcagcgagcgtcctgatccttccgcccggacgctcaggacagcggcccgctgctcataagactcggccttagaaccccagtatcagcagaaggacattttaggacgggacttgggtgactctagggcactggttttctttccagagagcggaacaggcgaggaaaagtagtcccttctcggcgattctgcggagggatctccgtggggcggtgaacgccgatgattatataaggacgcgccgggtgtggcacagctagttccgtcgcagccgggatttgggtcgcggttcttgtttgtggatcgctgtgatcgtcacttggt

SEQ ID NO: 40372 - DNA, 234 bp, Artificial Sequence
  Promoter variant sequence
tggctccggtgcccgtcagtgggcagagcgcacatcgcccacagtccccgagaagttggggggaggggtcggcaattgaaccggtgcctagagaaggtggcgcggggtaaactgggaaagtgatgtcgtgtactggctccgcctttttcccgagggtgggggagaaccgtatataagtgcagtagtcgccgtgaacgttctttttcgcaacgggtttgccgccagaacacaggt

SEQ ID NO: 40373 - DNA, 335 bp, Artificial Sequence
  Promoter variant sequence
cgttacataacttacggtaaatggcccgcctggctgaccgcccaacgacccccgcccattgacgtcaataatgacgtatgttcccatagtaacgccaatagggactttccattgacgtcaatgggtggagtatttacggtaaactgcccacttggcagtacatcaagtgtatcatatgccaagtacgccccctattgacgtcaatgacggtaaatggcccgcctggcattatgcccagtacatgaccttatgggactttcctacttggcagtacatctacgtattagtcatcgctattaccatgagagggtatataatggaagctcgacttccag

SEQ ID NO: 40374 - DNA, 100 bp, Artificial Sequence
  Promoter variant sequence
ccaaaatcaacgggactttccaaaatgtcgtaataaccccgccccgttgacgcaaatgggcggtaggcgtgtacggtgggaggtctatataagcagagct

SEQ ID NO: 40375 - DNA, 52 bp, Artificial Sequence
  Promoter variant sequence
gacgcaaatgggcggtaggcgtgtacggtgggaggtctatataagcagagct

SEQ ID NO: 40376 - DNA, 39 bp, Artificial Sequence
  Promoter variant sequence
ggtaggcgtgtacggtgggaggtctatataagcagagct

SEQ ID NO: 40377 - DNA, 146 bp, Artificial Sequence
  Promoter variant sequence
atgacacaaaccccgcccagcgtcttgtcattggcgaattcgaacacgcagatgcagtcggggcggcgcggtcccaggtccacttcgcatattaaggtgacgcgtgtggcctcgaacaccgagcgaccctgcagcgacccgcttaa

SEQ ID NO: 40378 - DNA, 63 bp, Artificial Sequence
  Promoter variant sequence
ttcgcatattaaggtgacgcgtgtggcctcgaacaccgagcgaccctgcagcgacccgcttaa

SEQ ID NO: 40379 - DNA, 114 bp, Artificial Sequence
  Promoter variant sequence
cattttgacacccccataatatttttccagaattaacagtataaattgcatctcttgttcaagagttccctatcactctctttaatcactactcacagtaacctcaactcctgc

SEQ ID NO: 40380 - DNA, 703 bp, Artificial Sequence
  Promoter variant sequence
actagtttcatcaccaccgccacccccccgcccccccgccatctgaaagggttctaggggatttgcaacctctctcgtgtgtttcttctttccgagaagcgccgccacacgagaaagctggccgcgaaagtcgtgctggaatcacttccaacgaaaccccaggcatagatgggaaagggtgaagaacacgttgccatggctaccgtttccccggtcacggaataaacgctctctaggatccggaagtagttccgccgcgacctctctaaaaggatggatgtgttctctgcttacattcattggacgttttcccttagaggccaaggccgcccaggcaaaggggcggtcccacgcgtgaggggcccgcggagccatttgattggagaaaagctgcaaaccctgaccaatcggaaggagccacgcttcgggcatcggtcaccgcacctggacagctccgattggtggacttccgccccccctcacgaatcctcattgggtgccgtgggtgcgtggtgcggcgcgattggtgggttcatgtttcccgtcccccgcccgcgagaagtgggggtgaaaagcggcccgacctgcttggggtgtagtgggcggaccgcgcggctggaggtgtgaggatccgaacccaggggtggggggtggaggcggctcctgcgatcgaaggggacttgagactcaccggccgcacgtc

SEQ ID NO: 40381 - DNA, 81 bp, Artificial Sequence
  Promoter variant sequence
gtacttatataagggggtgggggcgcgttcgtcctcagtcgcgatcgaacactcgagccgagcagacgtgcctacggaccg

SEQ ID NO: 40382 - DNA, 81 bp, Artificial Sequence
  Promoter variant sequence
aggtctatataagcagagctcgtttagtgaaccgtcagatcgcctggagacgtcgagccgagtggttgtgcctccatagaa

SEQ ID NO: 40383 - DNA, 81 bp, Artificial Sequence
  Promoter variant sequence
aggtctatataagcagagctcgtttagtgaaccgtcagtccgcctggagacctgcagccgagtggtcgtgcctccatagaa

SEQ ID NO: 40384 - DNA, 229 bp, Artificial Sequence
  Promoter variant sequence
agctgaatggggtccgcctcttttccctgcctaaacagacaggaactcctgccaattgagggcgtcaccgctaaggctccgccccagcctgggctccacaaccaatgaagggtaatctcgacaaagagcaaggggtggggcgcgggcgcgcaggtgcagcagcacacaggctggtcgggagggcggggcgcgacgtctgccgtgcggggtcccggcatcggttgcgcgc

SEQ ID NO: 40385 - DNA, 68 bp, Artificial Sequence
  Promoter variant sequence
ggtaggcgtgtacggtgggaggcctatataagcagagctcgtttagtgaaccgtcagatcgcctggag

SEQ ID NO: 40386 - DNA, 65 bp, Artificial Sequence
  Promoter variant sequence
aggtctatataagcagagctctctggctaactagagaacccactgcttaactggcttatcgaaat

SEQ ID NO: 40387 - DNA, 39 bp, Artificial Sequence; identical to SEQ ID NO: 40376
  Promoter variant sequence

SEQ ID NO: 40388 - DNA, 81 bp, Artificial Sequence
  Promoter variant sequence
ggggctataaaagggggtgggggcgcgttcgtcctcactctcttccgcatcgctgtctgcgagggccagctgttggggtga

SEQ ID NO: 40389 - DNA, 107 bp, Artificial Sequence
  Promoter variant sequence
gggggaggagattaggttaaaggtctttgtattaggaggctgtaggcataaattggtctgttcaccagcaccatgcaactttttcacctctgcctaatcatctcatg

SEQ ID NO: 40390 - DNA, 227 bp, Artificial Sequence
  Promoter variant sequence
tgtagtcttatgcaatactcttgtagtcttgcaacatggtaacgatgagttagcaacatgccttacaaggagagaaaaagcaccgtgcatgccgattggtggaagtaaggtggtacgatcgtgccttattaggaaggcaacagacgggtctgacatggattggacgaaccactgaattgccgcattgcagagatattgtatttaagtgcctagctcgatacataaac

SEQ ID NO: 40391 - DNA, 448 bp, Artificial Sequence
  Promoter variant sequence
agtgcaagtgggttttaggaccaggatgaggcggggtgggggtgcctacctgacgaccgaccccgacccactggacaagcacccaacccccattccccaaattgcgcatcccctatcagagagggggaggggaaacaggatgcggcgaggcgcgtgcgcactgccagcttcagcaccgcggacagtgccttcgcccccgcctggcggcgcgcgccaccgccgcctcagcactgaaggcgcgctgacgtcactcgccggtcccccgcaaactccccttcccggccaccttggtcgcgtccgcgccgccgccggcccagccggaccgcaccacgcgaggcgcgagataggggggcacgggcgcgaccatctgcgctgcggcgccggcgactcagcgctgcctcagtctgcggtgggcagcggaggagtcgtgtcgtgcctgagagcgcag

SEQ ID NO: 40392 - DNA, 330 bp, Artificial Sequence
  Promoter variant sequence
gtgtgtcagttagggtgtggaaagtccccaggctccccagcaggcagaagtatgcaaagcatgcatctcaattagtcagcaaccaggtgtggaaagtccccaggctccccagcaggcagaagtatgcaaagcatgcatctcaattagtcagcaaccatagtcccgcccctaactccgcccatcccgcccctaactccgcccagttccgcccattctccgccccatggctgactaattttttttatttatgcagaggccgaggccgcctcggcctctgagctattccagaagtagtgaggaggcttttttggaggcctaggcttttgcaaa

SEQ ID NO: 40393 - DNA, 511 bp, Artificial Sequence
  Promoter variant sequence
ggggttggggttgcgccttttccaaggcagccctgggtttgcgcagggacgcggctgctctgggcgtggttccgggaaacgcagcggcgccgaccctgggtctcgcacattcttcacgtccgttcgcagcgtcacccggatcttcgccgctacccttgtgggccccccggcgacgcttcctgctccgcccctaagtcgggaaggttccttgcggttcgcggcgtgccggacgtgacaaacggaagccgcacgtctcactagtaccctcgcagacggacagcgccagggagcaatggcagcgcgccgaccgcgatgggctgtggccaatagcggctgctcagcagggcgcgccgagagcagcggccgggaaggggcggtgcgggaggcggggtgtggggcggtagtgtgggccctgttcctgcccgcgcggtgttccgcattctgcaagcctccggagcgcacgtcggcagtcggctccctcgttgaccgaatcaccgacctctctccccag

SEQ ID NO: 40394 - DNA, 164 bp, Artificial Sequence
  Promoter variant sequence
gggcggagttagggcggagccaatcagcgtgcgccgttccgaaagttgccttttatggctgggcggagaatgggcggtgaacgccgatgattatataaggacgcgccgggtgtggcacagctagttccgtcgcagccgggatttgggtcgcggttcttgtttgt

SEQ ID NO: 40395 - DNA, 326 bp, Artificial Sequence
  Promoter variant sequence
gggcggagttagggcggagccaatcagcgtgcgccgttccgaaagttgccttttatggctgggcggagaatgggcggtgaacgccgatgattatataaggacgcgccgggtgtggcacagctagttccgtcgcagccgggatttgggtcgcggttcttgtttgtggatccctgtgatcgtcacttggtaagtcactgactgtctatgcctgggaaagggtgggcaggagatggggcagtgcaggaaaagtggcactatgaaccctgcagccctaggaatgcatctagacaattgtactaaccttcttctctttcctctcctgacag

SEQ ID NO: 40396 - DNA, 325 bp, Artificial Sequence
  Promoter variant sequence
ccccgcagccattctagctagcggtaccaatagcaaccggcagctgccctccgcttttgctccgccccttctgcttgcgatctgtttccgcttccggtcccgcagttccggctctgccgtgaagagctttgcattgtgggaagtctttcctttctcgttccccggccatcttagcggctgctgttggtgagtgggctcctaccgaccgaggtttaggcagcgcggggagctttgcgggttgccatttgtaactccggatcctaaaattcctgtcctgttctctgtctcttctaggttgggggccgtcccgctcctaaggcaggaa

SEQ ID NO: 40397 - DNA, 243 bp, Artificial Sequence
  Promoter variant sequence
agccccggaaccttcgctgttctcttacctatgaaccttacgaactgtaaagaaaggcgcaccggaagttgtggtacccaagccatactctcataaatccagccaggtcgcgctgaaacagtttccggaagcacttctcctagatcgcaccgcctcttcctcctggaagctatataatgatatcgcgtcacttccgctctctcttccacaggaggcctacacgccgccgcttgtgctgcagcc

SEQ ID NO: 40398 - DNA, 493 bp, Artificial Sequence
  Promoter variant sequence
ccacgttctgcttcactctccccatctcccccccctccccacccccaattttgtatttatttattttttaattattttgtgcagcgatgggggcggggggggggggggggcgcgcgccaggcggggcggggcggggcgaggggcggggcggggcgaggcggagaggtgcggcggcagccaatcagagcggcgcgctccgaaagtttccttttatggcgaggcggcggcggcggcggccctataaaaagcgaagcgcgcggcgggcgggagcgggatcagccaccgcggtggcggcctagagtcgacgaggaactgaaaaaccagaaagttaactggtaagtttagtctttttgtcttttatttcaggtcccggatccggtggtggtgcaaatcaaagaactgctcctcagtggatgttgcctttacttctaggcctgtacggaagtgttacttctgctctaaaagctgcggaattgtacccgcggccgatcca

SEQ ID NO: 40399 - DNA, 565 bp, Artificial Sequence
  Promoter variant sequence
cgttacataacttacggtaaatggcccgcctggctgaccgcccaacgacccccgcccattgacgtcaatagtaacgccaatagggactttccattgacgtcaatgggtggagtatttacggtaaactgcccacttggcagtacatcaagtgtatcatatgccaagtacgccccctattgacgtcaatgacggtaaatggcccgcctggcattgtgcccagtacatgaccttatgggactttcctacttggcagtacatctacgtattagtcatcgctattaccatggtcgaggtgagccccacgttctgcttcactctccccatctcccccccctccccacccccaattttgtatttatttattttttaattattttgtgcagcgatgggggcggggggggggggggggcgcgcgccaggcggggcggggcggggcgaggggcggggcggggcgaggcggagaggtgcggcggcagccaatcagagcggcgcgctccgaaagtttccttttatggcgaggcggcggcggcggcggccctataaaaagcgaagcgcgcggcgggcg

SEQ ID NO: 40400 - DNA, 204 bp, Artificial Sequence
  Promoter variant sequence
gtgatgcggttttggcagtacatcaatgggcgtggatagcggtttgactcacggggatttccaagtctccaccccattgacgtcaatgggagtttgttttggcaccaaaatcaacgggactttccaaaatgtcgtaacaactccgccccattgacgcaaatgggcggtaggcgtgtacggtgggaggtctatataagcagagct

SEQ ID NO: 40401 - DNA, 241 bp, Artificial Sequence
  Pol III promoter
gagggcctatttcccatgattccttcatatttgcatatacgatacaaggctgttagagagataattggaattaatttgactgtaaacacaaagatattagtacaaaatacgtgacgtagaaagtaataatttcttgggtagtttgcagttttaaaattatgttttaaaatggactatcatatgcttaccgtaacttgaaagtatttcgatttcttggctttatatatcttgtggaaaggac

SEQ ID NO: 40402 - DNA, 215 bp, Artificial Sequence
  Pol III promoter
gaacgctgacgtcatcaacccgctccaaggaatcgcgggcccagtgtcactaggcgggaacacccagcgcgcgtgcgccctggcaggaagatggctgtgagggacaggggagtggcgccctgcaatatttgcatgtcgctatgtgttctgggaaatcaccataaacgtgaaatgtctttggatttgggaatcttataagttctgtatgagaccac

SEQ ID NO: 40403 - DNA, 244 bp, Artificial Sequence
  Pol III promoter
ctgcagtatttagcatgccccacccatctgcaaggcattctggatagtgtcaaaacagccggaaatcaagtccgtttatctcaaactttagcattttgggaataaatgatatttgctatgctggttaaattagattttagttaaatttcctgctgaagctctagtacgataagtaacttgacctaagtgtaaagttgagatttccttcaggtttatatagcttgtgcgccgcctgggtacctcg

SEQ ID NO: 40404 - DNA, 103 bp, Artificial Sequence
  Pol III promoter
gagggcctatttcccatgattccttcatatttgcatatacgatagcttaccgtaacttgaaagtatttcgatttcttggctttatatatcttgtggaaaggac

SEQ ID NO: 40405 - DNA, 38 bp, Artificial Sequence
  Pol III promoter
tttcgatttcttggctttatatatcttgtggaaaggac

SEQ ID NO: 40406 - DNA, 67 bp, Artificial Sequence
  Pol III promoter
atacgatagcttaccgtaacttgaaagtatttcgatttcttggctttatatatcttgtggaaaggac

SEQ ID NO: 40407 - DNA, 79 bp, Artificial Sequence
  Pol III promoter
gagggcctatttcccatgattccttcatatttgcattttcgatttcttggctttatatatcttgtggaaaggacgaaac

SEQ ID NO: 40408 - DNA, 111 bp, Artificial Sequence
  Pol III promoter
gagggcctatttcccatgattccttcatatttgcatatttgcatatacgatagcttaccgtaacttgaaagtatttcgatttcttggctttatatatcttgtggaaaggac

SEQ ID NO: 40409 - DNA, 127 bp, Artificial Sequence
  Pol III promoter
gagggcctatttcccatgattccttcatatttgcatatttgcatatttgcatatttgcatatacgatagcttaccgtaacttgaaagtatttcgatttcttggctttatatatcttgtggaaaggac

SEQ ID NO: 40410 - DNA, 123 bp, Artificial Sequence
  Pol III promoter
gagggcctatttcccatgattccttcatatttcccatgattccttcatatttgcatatacgatagcttaccgtaacttgaaagtatttcgatttcttggctttatatatcttgtggaaaggac

SEQ ID NO: 40411 - DNA, 143 bp, Artificial Sequence
  Pol III promoter
gagggcctatttcccatgattccttcatatttcccatgattccttcatatttcccatgattccttcatatttgcatatacgatagcttaccgtaacttgaaagtatttcgatttcttggctttatatatcttgtggaaaggac

SEQ ID NO: 40412 - DNA, 131 bp, Artificial Sequence
  Pol III promoter
gagggcctatttcccatgattccttcatatttgcatatttcccatgattccttcatatttgcatatacgatagcttaccgtaacttgaaagtatttcgatttcttggctttatatatcttgtggaaaggac

SEQ ID NO: 40413 - DNA, 159 bp, Artificial Sequence
  Pol III promoter
gagggcctatttcccatgattccttcatatttgcatatttcccatgattccttcatatttgcatatttcccatgattccttcatatttgcatatacgatagcttaccgtaacttgaaagtatttcgatttcttggctttatatatcttgtggaaaggac

SEQ ID NO: 40414 - DNA, 103 bp, Artificial Sequence
  Pol III promoter
gagggcctatttcccatgattccttcatatgcaaatatacgatagcttaccgtaacttgaaagtatttcgatttcttggctttatatatcttgtggaaaggac

SEQ ID NO: 40415 - DNA, 111 bp, Artificial Sequence
  Pol III promoter
gagggcctatttcccatgattccttcatatgcaaatatgcaaatatacgatagcttaccgtaacttgaaagtatttcgatttcttggctttatatatcttgtggaaaggac

SEQ ID NO: 40416 - DNA, 127 bp, Artificial Sequence
  Pol III promoter
gagggcctatttcccatgattccttcatatgcaaatatgcaaatatgcaaatatgcaaatatacgatagcttaccgtaacttgaaagtatttcgatttcttggctttatatatcttgtggaaaggac

SEQ ID NO: 40417 - DNA, 103 bp, Artificial Sequence
  Pol III promoter
gagggcctatgcaaatatgaaggaatcatgggaaatatacgatagcttaccgtaacttgaaagtatttcgatttcttggctttatatatcttgtggaaaggac

SEQ ID NO: 40418 - DNA, 131 bp, Artificial Sequence
  Pol III promoter
gagggcctatgcaaatatgaaggaatcatgggaaatatgcaaatatgaaggaatcatgggaaatatacgatagcttaccgtaacttgaaagtatttcgatttcttggctttatatatcttgtggaaaggac

SEQ ID NO: 40419 - DNA, 159 bp, Artificial Sequence
  Pol III promoter
gagggcctatgcaaatatgaaggaatcatgggaaatatgcaaatatgaaggaatcatgggaaatatgcaaatatgaaggaatcatgggaaatatacgatagcttaccgtaacttgaaagtatttcgatttcttggctttatatatcttgtggaaaggac

SEQ ID NO: 40420 - DNA, 128 bp, Artificial Sequence
  Pol III promoter
gagggcctatttcccatgattccttcatatttgcatatacgtttgactgtaaatacgtgacgtagaatagcttaccgtaacttgaaagtatttcgatttcttggctttatatatcttgtggaaaggac

SEQ ID NO: 40421 - DNA, 208 bp, Artificial Sequence
  Poly A sequence
ctgtgccttctagttgccagccatctgttgtttgcccctcccccgtgccttccttgaccctggaaggtgccactcccactgtcctttcctaataaaatgaggaaattgcatcgcattgtctgagtaggtgtcattctattctggggggtggggtggggcaggacagcaagggggaggattgggaagagaatagcaggcatgctgggga

SEQ ID NO: 40422 - DNA, 623 bp, Artificial Sequence
  Poly A sequence
gggtggcatccctgtgacccctccccagtgcctctcctggccctggaagttgccactccagtgcccaccagccttgtcctaataaaattaagttgcatcattttgtctgactaggtgtccttctataatattatggggtggaggggggtggtatggagcaaggggcaagttgggaagacaacctgtagggcctgcggggtctattgggaaccaagctggagtgcagtggcacaatcttggctcactgcaatctccgcctcctgggttcaagcgattctcctgcctcagcctcccgagttgttgggattccaggcatgcatgaccaggctcagctaatttttgtttttttggtagagacggggtttcaccatattggccaggctggtctccaactcctaatctcaggtgatctacccaccttggcctcccaaattgctgggattacaggcgtgaaccactgctcccttccctgtccttctgattttaaaataactataccagcaggaggacgtccagacacagcataggctacctggccatgcccaaccggtgggacatttgagttgcttgcttggcactgtcctctcatgcgttgggtccactcagtagatgcctgttgaatt

SEQ ID NO: 40423 - DNA, 477 bp, Artificial Sequence
  Poly A sequence
gggtggcatccctgtgacccctccccagtgcctctcctggccctggaagttgccactccagtgcccaccagccttgtcctaataaaattaagttgcatcattttgtctgactaggtgtccttctataatattatggggtggaggggggtggtatggagcaaggggcaagttgggaagacaacctgtagggcctgcggggtctattgggaaccaagctggagtgcagtggcacaatcttggctcactgcaatctccgcctcctgggttcaagcgattctcctgcctcagcctcccgagttgttgggattccaggcatgcatgaccaggctcagctaatttttgtttttttggtagagacggggtttcaccatattggccaggctggtctccaactcctaatctcaggtgatctacccaccttggcctcccaaattgctgggattacaggcgtgaaccactgctcccttccctgtcctt

SEQ ID NO: 40424 - DNA, 49 bp, Artificial Sequence
  Poly A sequence
cggcaataaaaagacagaataaaacgcacgggtgttgggtcgtttgttc

SEQ ID NO: 40425 - DNA, 49 bp, Artificial Sequence
  Poly A sequence
aataaaagatctttattttcattagatctgtgtgttggttttttgtgtg

SEQ ID NO: 40426 - DNA, 122 bp, Artificial Sequence
  Poly A sequence
aacttgtttattgcagcttataatggttacaaataaagcaatagcatcacaaatttcacaaataaagcatttttttcactgcattctagttgtggtttgtccaaactcatcaatgtatctta

SEQ ID NO: 40427 - DNA, 82 bp, Artificial Sequence
  Poly A sequence
aacttgtttattgcagcttataatggttacaaataaagcaatagcatcacaaatttcacaaataaagcatttttttcactgc

SEQ ID NO: 40428 - DNA, 395 bp, Artificial Sequence
  Poly A sequence
gctcgctttcttgctgtccaatttctattaaaggttcctttgttccctaagtccaactactaaactgggggatattatgaagggccttgagcatctggattctgcctaataaaaaacatttattttcattgcaatgatgtatttaaattatttctgaatattttactaaaaagggaatgtgggaggtcagtgcatttaaaacataaagaaatgaagagctagttcaaaccttgggaaaatacactatatcttaaactccatgaaagaaggtgaggctgcaaacagctaatgcacattggcaacagcccctgatgcctatgccttattcatccctcagaaaaggattcaagtagaggcttgatttggaggttaaagttttgctatgctgtatttta

SEQ ID NO: 40429 - DNA, 56 bp, Artificial Sequence
  Poly A sequence
aataaaggaaatttattttcattgcaatagtgtgttggaattttttgtgtctctca

SEQ ID NO: 40430 - DNA, 181 bp, Artificial Sequence
  Poly A sequence
tatttgtgaaatttgtgatgctattgctttatttgtaaccatctagctttatttgtgaaatttgtgatgctattgctttatttgtaaccattataagctgcaataaacaagttaacaacaacaattgcattcattttatgtttcaggttcagggggagatgtgggaggttttttaaagcgg

SEQ ID NO: 40431 - DNA, 592 bp, Artificial Sequence
  Post-transcription element
aatcaacctctggattacaaaatttgtgaaagattgactggtattcttaactatgttgctccttttacgctatgtggatacgctgctttaatgcctttgtatcatgctattgcttcccgtatggctttcattttctcctccttgtataaatcctggttgctgtctctttatgaggagttgtggcccgttgtcaggcaacgtggcgtggtgtgcactgtgtttgctgacgcaacccccactggttggggcattgccaccacctgtcagctcctttccgggactttcgctttccccctccctattgccacggcggaactcatcgccgcctgccttgcccgctgctggacaggggctcggctgttgggcactgacaattccgtggtgttgtcggggaagctgacgtcctttccatggctgctcgcctgtgttgccacctggattctgcgcgggacgtccttctgctacgtcccttcggccctcaatccagcggaccttccttcccgcggcctgctgccggctctgcggcctcttccgcgtcttcgccttcgccctcagacgagtcggatctccctttgggccgcctccccgcctg

SEQ ID NO: 40432 - DNA, 593 bp, Artificial Sequence
  Post-transcription element
atcgataatcaacctctggattacaaaatttgtgaaagattgactggtattcttaactatgttgctccttttacgctatgtggatacgctgctttaatgcctttgtatcatgctattgcttcccgtatggctttcattttctcctccttgtataaatcctggttgctgtctctttatgaggagttgtggcccgttgtcaggcaacgtggcgtggtgtgcactgtgtttgctgacgcaacccccactggttggggcattgccaccacctgtcagctcctttccgggactttcgctttccccctccctattgccacggcggaactcatcgccgcctgccttgcccgctgctggacaggggctcggctgttgggcactgacaattccgtggtgttgtcggggaaatcatcgtcctttccttggctgctcgcctgtgttgccacctggattctgcgcgggacgtccttctgctacgtcccttcggccctcaatccagcggaccttccttcccgcggcctgctgccggctctgcggcctcttccgcgtcttcgccttcgccctcagacgagtcggatctccctttgggccgcctcccc

SEQ ID NO: 40433 - DNA, 247 bp, Artificial Sequence
  Post-transcription element
gataatcaacctctggattacaaaatttgtgaaagattgactggtattcttaactatgttgctccttttacgctatgtggatacgctgctttaatgcctttgtatcatgctattgcttcccgtatggctttcattttctcctccttgtataaatcctggttagttcttgccacggcggaactcatcgccgcctgccttgcccgctgctggacaggggctcggctgttgggcactgacaattccgtgg

SEQ ID NO: 40434 - DNA, 584 bp, Artificial Sequence; identical to SEQ ID NO: 40370
  Enhancer element

SEQ ID NO: 40435 - DNA, 204 bp, Artificial Sequence; identical to SEQ ID NO: 40400
  Enhancer element

SEQ ID NO: 40436 - DNA, 414 bp, Artificial Sequence
  Enhancer element
aagatgcgtcaattaatttgcgtcaatttgcgctcaatttgcgtcaatcttgctgtcatttgcgtcaatttgcgtcaatatgcgtcaatatatgcgtcaattcgaattcgcactaatgatgactaatggtggctaatggtgactaatggtgacaatgcgtgactaatggtgataatgagtgcatatggtgactaatggtgactaatggtggtgatgcggttttggcagtacatcaatgggcgtggatagcggtttgactcacggggatttccaagtctccaccccattgacgtcaatgggagtttgttttggcaccaaaatcaacgggactttccaaaatgtcgtaacaactccgccccattgacgcaaatgggcggtaggcgtgtacggtgggaggtctatataagcagagct

SEQ ID NO: 40437 - DNA, 314 bp, Artificial Sequence
  Enhancer element
tgggacagaaaacgagaaaccagggttgtcagcggggcccgcgccggccgccccttggcccgcgggataccccgggcgcccagtgcccaggccgggcaggcggcactcacgtgatgcggttttggcagtacatcaatgggcgtggatagcggtttgactcacggggatttccaagtctccaccccattgacgtcaatgggagtttgttttggcaccaaaatcaacgggactttccaaaatgtcgtaacaactccgccccattgacgcaaatgggcggtaggcgtgtacggtgggaggtctatataagcagagct

SEQ ID NO: 40438 - DNA, 324 bp, Artificial Sequence
  Enhancer element
cggaagcgagggtgtcgctcgcccccgggcccgggtccgccccgctccgaggcctgctcggaagaaagacctcggtgcgcagttctcgtcgcgctcccacacctggtccgcccagtcggagtgatgcggttttggcagtacatcaatgggcgtggatagcggtttgactcacggggatttccaagtctccaccccattgacgtcaatgggagtttgttttggcaccaaaatcaacgggactttccaaaatgtcgtaacaactccgccccattgacgcaaatgggcggtaggcgtgtacggtgggaggtctatataagcagagct

SEQ ID NO: 40439 - DNA, 304 bp, Artificial Sequence
  Enhancer element
gtgatgcggttttggcagtacatcaatgggcgtggataggcgggccgggagcgagggaggcggcgccgggggacgcgccgggctcggcctggcgaccgttgcccgctcgcgtccatccatccattcattcgggcggcagcggtttgactcacggggatttccaagtctccaccccattgacgtcaatgggagtttgttttggcaccaaaatcaacgggactttccaaaatgtcgtaacaactccgccccattgacgcaaatgggcggtaggcgtgtacggtgggaggtctatataagcagagct

SEQ ID NO: 40440 - DNA, 304 bp, Artificial Sequence
  Enhancer element
aggcgggccgggagcgagggaggcggcgccgggggacgcgccgggctcggcctggcgaccgttgcccgctcgcgtccatccatccattcattcgggcggcgtgatgcggttttggcagtacatcaatgggcgtggatagcggtttgactcacggggatttccaagtctccaccccattgacgtcaatgggagtttgttttggcaccaaaatcaacgggactttccaaaatgtcgtaacaactccgccccattgacgcaaatgggcggtaggcgtgtacggtgggaggtctatataagcagagct

SEQ ID NO: 40441 - DNA, 274 bp, Artificial Sequence
  Enhancer element
ccttcccctccagtgctcctcggagcccttccctatacttcctccaagctccaccctcgatcagccctgcgtgatgcggttttggcagtacatcaatgggcgtggatagcggtttgactcacggggatttccaagtctccaccccattgacgtcaatgggagtttgttttggcaccaaaatcaacgggactttccaaaatgtcgtaacaactccgccccattgacgcaaatgggcggtaggcgtgtacggtgggaggtctatataagcagagct

SEQ ID NO: 40442 - DNA, 354 bp, Artificial Sequence
  Enhancer element
agaggtggtggggctgagccgaggtggggccgtggccagggggagggggtgctaggccggaaggggctgcagccgagggtggccctgattttgtggccggccaggagcgaaggggtccctttctgtcccctgagcaccgtcgcctcctttgtgatgcggttttggcagtacatcaatgggcgtggatagcggtttgactcacggggatttccaagtctccaccccattgacgtcaatgggagtttgttttggcaccaaaatcaacgggactttccaaaatgtcgtaacaactccgccccattgacgcaaatgggcggtaggcgtgtacggtgggaggtctatataagcagagct

SEQ ID NO: 40443 - protein, 9 aa, Artificial Sequence
  NLS 5'
PKKKRKVSR

SEQ ID NO: 40444 - protein, 39 aa, Artificial Sequence
  NLS 5'
PKKKRKVGGSPKKKRKVGGSPKKKRKVGGSPKKKRKVSR

SEQ ID NO: 40445 - protein, 59 aa, Artificial Sequence
  NLS 5'
PKKKRKVGGSPKKKRKVGGSPKKKRKVGGSPKKKRKVGGSPKKKRKVGGSPKKKRKVSR

SEQ ID NO: 40446 - protein, 11 aa, Artificial Sequence
  NLS 5'
PAAKRVKLDSR

SEQ ID NO: 40447 - protein, 23 aa, Artificial Sequence
  NLS 5'
PAAKRVKLDGGSPAAKRVKLDSR

SEQ ID NO: 40448 - protein, 47 aa, Artificial Sequence
  NLS 5'
PAAKRVKLDGGSPAAKRVKLDGGSPAAKRVKLDGGSPAAKRVKLDSR

SEQ ID NO: 40449 - protein, 71 aa, Artificial Sequence
  NLS 5'
PAAKRVKLDGGSPAAKRVKLDGGSPAAKRVKLDGGSPAAKRVKLDGGSPAAKRVKLDGGSPAAKRVKLDSR

SEQ ID NO: 40450 - protein, 18 aa, Artificial Sequence
  NLS 5'
KRPAATKKAGQAKKKKSR

SEQ ID NO: 40451 - protein, 37 aa, Artificial Sequence
  NLS 5'
KRPAATKKAGQAKKKKGGSKRPAATKKAGQAKKKKSR

SEQ ID NO: 40452 - protein, 21 aa, Artificial Sequence
  NLS 5'
PAAKRVKLDGGSPKKKRKVSR

SEQ ID NO: 40453 - protein, 21 aa, Artificial Sequence
  NLS 5'
PAAKKKKLDGGSPKKKRKVSR

SEQ ID NO: 40454 - protein, 11 aa, Artificial Sequence
  NLS 5'
PAAKKKKLDSR

SEQ ID NO: 40455 - protein, 35 aa, Artificial Sequence
  NLS 5'
PAAKKKKLDGGSPAAKKKKLDGGSPAAKKKKLDSR

SEQ ID NO: 40456 - protein, 47 aa, Artificial Sequence
  NLS 5'
PAAKKKKLDGGSPAAKKKKLDGGSPAAKKKKLDGGSPAAKKKKLDSR

SEQ ID NO: 40457 - protein, 13 aa, Artificial Sequence
  NLS 5'
PAKRARRGYKCSR

SEQ ID NO: 40458 - protein, 26 aa, Artificial Sequence
  NLS 5'
PAKRARRGYKCGSPAKRARRGYKCSR

SEQ ID NO: 40459 - protein, 9 aa, Artificial Sequence
  NLS 5'
PRRKREESR

SEQ ID NO: 40460 - protein, 9 aa, Artificial Sequence
  NLS 5'
PYRGRKESR

SEQ ID NO: 40461 - protein, 9 aa, Artificial Sequence
  NLS 3'
GSPKKKRKV

SEQ ID NO: 40462 - protein, 39 aa, Artificial Sequence
  NLS 3'
GSPKKKRKVGGSPKKKRKVGGSPKKKRKVGGSPKKKRKV

SEQ ID NO: 40463 - protein, 59 aa, Artificial Sequence
  NLS 3'
GSPKKKRKVGGSPKKKRKVGGSPKKKRKVGGSPKKKRKVGGSPKKKRKVGGSPKKKRKV

SEQ ID NO: 40464 - protein, 11 aa, Artificial Sequence
  NLS 3'
GSPAAKRVKLD

SEQ ID NO: 40465 - protein, 23 aa, Artificial Sequence
  NLS 3'
GSPAAKRVKLDGGSPAAKRVKLD

SEQ ID NO: 40466 - protein, 47 aa, Artificial Sequence
  NLS 3'
GSPAAKRVKLDGGSPAAKRVKLDGGSPAAKRVKLDGGSPAAKRVKLD

SEQ ID NO: 40467 - protein, 71 aa, Artificial Sequence
  NLS 3'
GSPAAKRVKLDGGSPAAKRVKLDGGSPAAKRVKLDGGSPAAKRVKLDGGSPAAKRVKLDGGSPAAKRVKLD

SEQ ID NO: 40468 - protein, 18 aa, Artificial Sequence
  NLS 3'
GSKRPAATKKAGQAKKKK

SEQ ID NO: 40469 - protein, 35 aa, Artificial Sequence
  NLS 3'
KRPAATKKAGQAKKKKGGSKRPAATKKAGQAKKKK

SEQ ID NO: 40470 - protein, 41 aa, Artificial Sequence
  NLS 3'
GSPAAKRVKLGGSPAAKRVKLGGSPKKKRKVGGSPKKKRKV

SEQ ID NO: 40471 - protein, 15 aa, Artificial Sequence
  NLS 3'
GSKLGPRKATGRWGS

SEQ ID NO: 40472 - protein, 19 aa, Artificial Sequence
  NLS 3'
GSKRKGSPERGERKRHWGS

SEQ ID NO: 40473 - protein, 31 aa, Artificial Sequence
  NLS 3'
GSPKKKRKVGSGSKRPAATKKAGQAKKKKLE

SEQ ID NO: 40474 - protein, 30 aa, Artificial Sequence
  NLS 3'
GPKRTADSQHSTPPKTKRKVEFEPKKKRKV

SEQ ID NO: 40475 - protein, 36 aa, Artificial Sequence
  NLS 3'
GGGSGGGSKRTADSQHSTPPKTKRKVEFEPKKKRKV

SEQ ID NO: 40476 - protein, 45 aa, Artificial Sequence
  NLS 3'
AEAAAKEAAAKEAAAKAKRTADSQHSTPPKTKRKVEFEPKKKRKV

SEQ ID NO: 40477 - protein, 40 aa, Artificial Sequence
  NLS 3'
GPPKKKRKVGGSKRTADSQHSTPPKTKRKVEFEPKKKRKV

SEQ ID NO: 40478 - protein, 28 aa, Artificial Sequence
  NLS 3'
GPAEAAAKEAAAKEAAAKAPAAKRVKLD

SEQ ID NO: 40479 - protein, 23 aa, Artificial Sequence
  NLS 3'
GPGGGSGGGSGGGSPAAKRVKLD

SEQ ID NO: 40480 - protein, 21 aa, Artificial Sequence
  NLS 3'
GPPKKKRKVPPPPAAKRVKLD

SEQ ID NO: 40481 - protein, 11 aa, Artificial Sequence
  NLS 3'
GPPAAKRVKLD

SEQ ID NO: 40482 - protein, 9 aa, Artificial Sequence
  NLS 3'
GSPKKKRKV

SEQ ID NO: 40483 - protein, 11 aa, Artificial Sequence
  NLS 3'
GSPAAKRVKLD

SEQ ID NO: 40484 - protein, 19 aa, Artificial Sequence
  NLS 3'
VGSKRPAATKKAGQAKKKK

SEQ ID NO: 40485 - protein, 44 aa, Artificial Sequence
  NLS 3'
TGGGPGGGAAAGSGSPKKKRKVGSGSKRPAATKKAGQAKKKKLE

SEQ ID NO: 40486 - protein, 44 aa, Artificial Sequence; identical to SEQ ID NO: 40485
  NLS 3'

SEQ ID NO: 40487 - protein, 26 aa, Artificial Sequence
  NLS 3'
TGGGPGGGAAAGSGSPKKKRKVGSGS

SEQ ID NO: 40488 - protein, 13 aa, Artificial Sequence
  NLS 3'
PPPPKKKRKVPPP

SEQ ID NO: 40489 - protein, 13 aa, Artificial Sequence
  NLS 3'
GGSPKKKRKVPPP

SEQ ID NO: 40490 - protein, 10 aa, Artificial Sequence
  NLS 3'
PPPPKKKRKV

SEQ ID NO: 40491 - protein, 10 aa, Artificial Sequence
  NLS 3'
GGSPKKKRKV

SEQ ID NO: 40492 - protein, 19 aa, Artificial Sequence
  NLS 3'
GGSPKKKRKVGGSGGSGGS

SEQ ID NO: 40493 - protein, 20 aa, Artificial Sequence
  NLS 3'
GGSPKKKRKVGGSPKKKRKV

SEQ ID NO: 40494 - protein, 26 aa, Artificial Sequence
  NLS 3'
GGSGGSGGSPKKKRKVGGSPKKKRKV

SEQ ID NO: 40495 - protein, 22 aa, Artificial Sequence
  NLS 3'
VGGGSGGGSGGGSPAAKRVKLD

SEQ ID NO: 40496 - protein, 13 aa, Artificial Sequence
  NLS 3'
VPPPPAAKRVKLD

SEQ ID NO: 40497 - protein, 25 aa, Artificial Sequence
  NLS 3'
VPPPGGGSGGGSGGGSPAAKRVKLD

SEQ ID NO: 40498 - protein, 22 aa, Artificial Sequence
  NLS 3'
VGGGSGGGSGGGSPAAKRVKLD

SEQ ID NO: 40499 - protein, 13 aa, Artificial Sequence
  NLS 3'
VPPPPAAKRVKLD

SEQ ID NO: 40500 - protein, 25 aa, Artificial Sequence
  NLS 3'
VPPPGGGSGGGSGGGSPAAKRVKLD

SEQ ID NO: 40501 - protein, 12 aa, Artificial Sequence
  NLS 3'
VGSPAAKRVKLD

SEQ ID NO: 40502 - DNA, 20 bp, Artificial Sequence
  Spacer sequence
aaggggctccgcaccacgcc

SEQ ID NO: 40503 - DNA, 20 bp, Artificial Sequence
  Spacer sequence
aagtggctccgcaccacgcc

SEQ ID NO: 40504 - DNA, 20 bp, Artificial Sequence
  Spacer sequence
aaggggctgcgtaccacacc

SEQ ID NO: 40505 - DNA, 18 bp, Artificial Sequence
  Spacer sequence
gggtcttcgagaagaccc

SEQ ID NO: 40506 - DNA, 89 bp, Artificial Sequence
  sgRNA guide sequence
actggcgcttttatctgattactttgagagccatcaccagcgactatgtcgtagtgggtaaagctccctcttcggagggagcatcaaag

SEQ ID NO: 40507 - DNA, 97 bp, Artificial Sequence
  sgRNA guide sequence
actggcacttttatctgattactttgagagccatcaccagcgactatgtcgtatgggtaaagcgcttacggacttcggtccgtaagaagcatcaaag

SEQ ID NO: 40508 - DNA, 96 bp, Artificial Sequence
  sgRNA guide sequence
actggcacttctatctgattactctgagagccatcaccagcgactatgtcgtatgggtaaagcgcttacggacttcggtccgtaagaagcatcaga

SEQ ID NO: 40509 - DNA, 98 bp, Artificial Sequence
  sgRNA guide sequence
actggcgcttctatctgattactctgagagccatcaccagcgactatgtcgtatgggtaaagccgcttacggacttcggtccgtaagaggcatcagag

SEQ ID NO: 40510 - DNA, 98 bp, Artificial Sequence; identical to SEQ ID NO: 40509
  sgRNA guide sequence

SEQ ID NO: 40511 - DNA, 98 bp, Artificial Sequence
  sgRNA guide sequence
actggcacttctatctgattactctgagcgccatcaccagcgactatgtcgtatgggtaaagccgcttacggacttcggtccgtaagaggcatcagag

SEQ ID NO: 40512 - DNA, 98 bp, Artificial Sequence
  sgRNA guide sequence
actggcgcttctatctgattactctgagcgccatcaccagcgactatgtcgtatgggtaaagccgcttacggacttcggtccgtaagaggcatcagag

SEQ ID NO: 40513 - DNA, 98 bp, Artificial Sequence
  sgRNA guide sequence
actggcgcttctatctgattactctgagcgccatcaccagcgactatgtcgtatgggtaaagcgccttacggacttcggtccgtaaggagcatcagag

SEQ ID NO: 40514 - DNA, 99 bp, Artificial Sequence
  sgRNA guide sequence
actggcgcttctatctgattactctgagcgccatcaccagcgactatgtcgtagtgggtaaagccgcttacggacttcggtccgtaagaggcatcagag

SEQ ID NO: 40515 - DNA, 98 bp, Artificial Sequence
  sgRNA guide sequence
acgggactttctatctgattactctgaagtccctcaccagcgactatgtcgtatgggtaaagccgcttacggacttcggtccgtaagaggcatcagag

SEQ ID NO: 40516 - DNA, 98 bp, Artificial Sequence
  sgRNA guide sequence
acctgtagttctatctgattactctgactacagtcaccagcgactatgtcgtatgggtaaagccgcttacggacttcggtccgtaagaggcatcagag

SEQ ID NO: 40517 - DNA, 109 bp, Artificial Sequence
  SgRNA guide with spacer sequence
actggcgcttttatctgattactttgagagccatcaccagcgactatgtcgtagtgggtaaagctccctcttcggagggagcatcaaagaaggggctccgcaccacgcc

SEQ ID NO: 40518 - DNA, 117 bp, Artificial Sequence
  SgRNA guide with spacer sequence
actggcacttttatctgattactttgagagccatcaccagcgactatgtcgtatgggtaaagcgcttacggacttcggtccgtaagaagcatcaaagaaggggctccgcaccacgcc

SEQ ID NO: 40519 - DNA, 116 bp, Artificial Sequence
  SgRNA guide with spacer sequence
actggcacttctatctgattactctgagagccatcaccagcgactatgtcgtatgggtaaagcgcttacggacttcggtccgtaagaagcatcagaaaggggctccgcaccacgcc

SEQ ID NO: 40520 - DNA, 118 bp, Artificial Sequence
  SgRNA guide with spacer sequence
actggcgcttctatctgattactctgagagccatcaccagcgactatgtcgtatgggtaaagccgcttacggacttcggtccgtaagaggcatcagagaaggggctccgcaccacgcc

SEQ ID NO: 40521 - DNA, 118 bp, Artificial Sequence
  SgRNA guide with spacer sequence
actggcacttctatctgattactctgagcgccatcaccagcgactatgtcgtatgggtaaagccgcttacggacttcggtccgtaagaggcatcagagaaggggctccgcaccacgcc

SEQ ID NO: 40522 - DNA, 118 bp, Artificial Sequence
  SgRNA guide with spacer sequence
actggcgcttctatctgattactctgagcgccatcaccagcgactatgtcgtatgggtaaagccgcttacggacttcggtccgtaagaggcatcagagaaggggctccgcaccacgcc

SEQ ID NO: 40523 - DNA, 118 bp, Artificial Sequence
  SgRNA guide with spacer sequence
actggcgcttctatctgattactctgagcgccatcaccagcgactatgtcgtatgggtaaagcgccttacggacttcggtccgtaaggagcatcagagaaggggctccgcaccacgcc

SEQ ID NO: 40524 - DNA, 119 bp, Artificial Sequence
  SgRNA guide with spacer sequence
actggcgcttctatctgattactctgagcgccatcaccagcgactatgtcgtagtgggtaaagccgcttacggacttcggtccgtaagaggcatcagagaaggggctccgcaccacgcc

SEQ ID NO: 40525 - DNA, 118 bp, Artificial Sequence
  SgRNA guide with spacer sequence
acgggactttctatctgattactctgaagtccctcaccagcgactatgtcgtatgggtaaagccgcttacggacttcggtccgtaagaggcatcagagaaggggctccgcaccacgcc

SEQ ID NO: 40526 - DNA, 118 bp, Artificial Sequence
  SgRNA guide with spacer sequence
acctgtagttctatctgattactctgactacagtcaccagcgactatgtcgtatgggtaaagccgcttacggacttcggtccgtaagaggcatcagagaaggggctccgcaccacgcc

SEQ ID NO: 40527 - DNA, 119 bp, Artificial Sequence
  SgRNA guide with spacer sequence
actggcgcttctatctgattactctgagcgccatcaccagcgactatgtcgtagtgggtaaagccgcttacggacttcggtccgtaagaggcatcagagaagtggctccgcaccacgcc

SEQ ID NO: 40528 - DNA, 109 bp, Artificial Sequence
  SgRNA guide with spacer sequence
actggcgcttttatctgattactttgagagccatcaccagcgactatgtcgtagtgggtaaagctccctcttcggagggagcatcaaagaaggggctgcgtaccacacc

SEQ ID NO: 40529 - DNA, 119 bp, Artificial Sequence
  SgRNA guide with spacer sequence
actggcgcttctatctgattactctgagcgccatcaccagcgactatgtcgtagtgggtaaagccgcttacggacttcggtccgtaagaggcatcagagaaggggctgcgtaccacacc

SEQ ID NO: 40530 - DNA, 117 bp, Artificial Sequence
  SgRNA guide with spacer sequence
actggcgcttctatctgattactctgagcgccatcaccagcgactatgtcgtagtgggtaaagccgcttacggacttcggtccgtaagaggcatcagaggggtcttcgagaagaccc

SEQ ID NO: 40531 - DNA, 20 bp, Artificial Sequence
  Spacer sequence
aaggggctccgcaccacgcc

SEQ ID NO: 40532 - DNA, 19 bp, Artificial Sequence
  Spacer sequence
aaggggctccgcaccacgc

SEQ ID NO: 40533 - DNA, 18 bp, Artificial Sequence
  Spacer sequence
aaggggctccgcaccacg

SEQ ID NO: 40534 - DNA, 20 bp, Artificial Sequence
  Spacer sequence
aagtggctccgcaccacgcc

SEQ ID NO: 40535 - DNA, 19 bp, Artificial Sequence
  Spacer sequence
aagtggctccgcaccacgc

SEQ ID NO: 40536 - DNA, 18 bp, Artificial Sequence
  Spacer sequence
aagtggctccgcaccacg

SEQ ID NO: 40537 - DNA, 20 bp, Artificial Sequence
  Spacer sequence
aaggggctgcgtaccacacc

SEQ ID NO: 40538 - DNA, 19 bp, Artificial Sequence
  Spacer sequence
aaggggctgcgtaccacac

SEQ ID NO: 40539 - DNA, 18 bp, Artificial Sequence
  Spacer sequence
aaggggctgcgtaccaca

SEQ ID NO: 40540 - DNA, 20 bp, Artificial Sequence
  Spacer sequence
aagtggctgcgtaccacacc

SEQ ID NO: 40541 - DNA, 19 bp, Artificial Sequence
  Spacer sequence
aagtggctgcgtaccacac

SEQ ID NO: 40542 - DNA, 18 bp, Artificial Sequence
  Spacer sequence
aagtggctgcgtaccaca

SEQ ID NO: 40543 - DNA, 89 bp, Artificial Sequence; identical to SEQ ID NO: 40506
  sgRNA guide sequence

SEQ ID NO: 40544 - DNA, 99 bp, Artificial Sequence; identical to SEQ ID NO: 40514
  sgRNA guide sequence

SEQ ID NO: 40545 - DNA, 109 bp, Artificial Sequence; identical to SEQ ID NO: 40517
  SgRNA guide with spacer sequence

SEQ ID NO: 40546 - DNA, 108 bp, Artificial Sequence
  SgRNA guide with spacer sequence
actggcgcttttatctgattactttgagagccatcaccagcgactatgtcgtagtgggtaaagctccctcttcggagggagcatcaaagaaggggctccgcaccacgc

SEQ ID NO: 40547 - DNA, 107 bp, Artificial Sequence
  SgRNA guide with spacer sequence
actggcgcttttatctgattactttgagagccatcaccagcgactatgtcgtagtgggtaaagctccctcttcggagggagcatcaaagaaggggctccgcaccacg

SEQ ID NO: 40548 - DNA, 109 bp, Artificial Sequence
  SgRNA guide with spacer sequence
actggcgcttttatctgattactttgagagccatcaccagcgactatgtcgtagtgggtaaagctccctcttcggagggagcatcaaagaagtggctccgcaccacgcc

SEQ ID NO: 40549 - DNA, 108 bp, Artificial Sequence
  SgRNA guide with spacer sequence
actggcgcttttatctgattactttgagagccatcaccagcgactatgtcgtagtgggtaaagctccctcttcggagggagcatcaaagaagtggctccgcaccacgc

SEQ ID NO: 40550 - DNA, 107 bp, Artificial Sequence
  SgRNA guide with spacer sequence
actggcgcttttatctgattactttgagagccatcaccagcgactatgtcgtagtgggtaaagctccctcttcggagggagcatcaaagaagtggctccgcaccacg

SEQ ID NO: 40551 - DNA, 119 bp, Artificial Sequence; identical to SEQ ID NO: 40529
  SgRNA guide with spacer sequence

SEQ ID NO: 40552 - DNA, 118 bp, Artificial Sequence
  SgRNA guide with spacer sequence
actggcgcttctatctgattactctgagcgccatcaccagcgactatgtcgtagtgggtaaagccgcttacggacttcggtccgtaagaggcatcagagaaggggctgcgtaccacac

SEQ ID NO: 40553 - DNA, 117 bp, Artificial Sequence
  SgRNA guide with spacer sequence
actggcgcttctatctgattactctgagcgccatcaccagcgactatgtcgtagtgggtaaagccgcttacggacttcggtccgtaagaggcatcagagaaggggctgcgtaccaca

SEQ ID NO: 40554 - DNA, 119 bp, Artificial Sequence
  SgRNA guide with spacer sequence
actggcgcttctatctgattactctgagcgccatcaccagcgactatgtcgtagtgggtaaagccgcttacggacttcggtccgtaagaggcatcagagaagtggctgcgtaccacacc

SEQ ID NO: 40555 - DNA, 118 bp, Artificial Sequence
  SgRNA guide with spacer sequence
actggcgcttctatctgattactctgagcgccatcaccagcgactatgtcgtagtgggtaaagccgcttacggacttcggtccgtaagaggcatcagagaagtggctgcgtaccacac

SEQ ID NO: 40556 - DNA, 117 bp, Artificial Sequence
  SgRNA guide with spacer sequence
actggcgcttctatctgattactctgagcgccatcaccagcgactatgtcgtagtgggtaaagccgcttacggacttcggtccgtaagaggcatcagagaagtggctgcgtaccaca

SEQ ID NO: 40557 - DNA, 130 bp, Artificial Sequence
  5' ITR
cctgcaggcagctgcgcgctcgctcgctcactgaggccgcccgggcgtcgggcgacctttggtcgcccggcctcagtgagcgagcgagcgcgcagagagggagtggccaactccatcactaggggttcct

SEQ ID NO: 40558 - DNA, 23 bp, Artificial Sequence
  buffer seq
gcggcctctagactcgaggcgtt

SEQ ID NO: 40559 - DNA, 380 bp, Artificial Sequence
  enhancer
gacattgattattgactagttattaatagtaatcaattacggggtcattagttcatagcccatatatggagttccgcgttacataacttacggtaaatggcccgcctggctgaccgcccaacgacccccgcccattgacgtcaataatgacgtatgttcccatagtaacgccaatagggactttccattgacgtcaatgggtggagtatttacggtaaactgcccacttggcagtacatcaagtgtatcatatgccaagtacgccccctattgacgtcaatgacggtaaatggcccgcctggcattatgcccagtacatgaccttatgggactttcctacttggcagtacatctacgtattagtcatcgctattaccatg

SEQ ID NO: 40560 - DNA, 204 bp, Artificial Sequence; identical to SEQ ID NO: 40400
  Pol II promoter

SEQ ID NO: 40561 - DNA, 15 bp, Artificial Sequence
  buffer seq
ctctggctaactacc

SEQ ID NO: 40562 - DNA, 12 bp, Artificial Sequence
  kozac
ggtgccaccatg

SEQ ID NO: 40563 - DNA, 6 bp, Artificial Sequence
  start codon
atggcc

SEQ ID NO: 40564 - DNA, 21 bp, Artificial Sequence
  5' NLS
ccaaagaagaagcggaaggtc

SEQ ID NO: 40565 - DNA, 6 bp, Artificial Sequence
  5' linker
tctaga

SEQ ID NO: 40566 - DNA, 6 bp, Artificial Sequence
  3' NLS linker
ggatcc

SEQ ID NO: 40567 - DNA, 21 bp, Artificial Sequence
  3' NLS
ccaaaaaagaagagaaaggta

SEQ ID NO: 40568 - DNA, 27 bp, Artificial Sequence
  tag
tacccatatgatgtccctgactacgct

SEQ ID NO: 40569 - DNA, 9 bp, Artificial Sequence
  linker
ggatcctaa

SEQ ID NO: 40570 - DNA, 30 bp, Artificial Sequence
  buffer seq
gaattcctagagctcgctgatcagcctcga

SEQ ID NO: 40571 - DNA, 208 bp, Artificial Sequence; identical to SEQ ID NO: 40421
  Poly(A)

SEQ ID NO: 40572 - DNA, 8 bp, Artificial Sequence
  buffer seq
ggtaccgt

SEQ ID NO: 40573 - DNA, 241 bp, Artificial Sequence; identical to SEQ ID NO: 40401
  Pol III promoter

SEQ ID NO: 40574 - DNA, 8 bp, Artificial Sequence
  buffer
gaaacacc

SEQ ID NO: 40575 - DNA, 17 bp, Artificial Sequence
  buffer
ttttttttggcggccgc

SEQ ID NO: 40576 - DNA, 141 bp, Artificial Sequence
  3' ITR
aggaacccctagtgatggagttggccactccctctctgcgcgctcgctcgctcactgaggccgggcgaccaaaggtcgcccgacgcccgggctttgcccgggcggcctcagtgagcgagcgagcgcgcagctgcctgcagg

SEQ ID NO: 40577 - DNA, 2931 bp, Artificial Sequence
  CasX variant
atgcaagagatcaagagaatcaacaagatcagaaggagactggtcaaggacagcaacacaaagaaggccggcaagacaggccccatgaaaaccctgctcgtcagagtgatgacccctgacctgagagagcggctggaaaacctgagaaagaagcccgagaacatccctcagcctatcagcaacaccagcagggccaacctgaacaagctgctgaccgactacaccgagatgaagaaagccatcctgcacgtgtactgggaagagttccagaaagaccccgtgggcctgatgagcagagttgctcagcccgctcctaagaacatcgaccagagaaagctgatccccgtgaaggacggcaacgagagactgacctctagcggctttgcctgcagccagtgttgccagcctctgtacgtgtacaagctggaacaagtgaacgacaagggcaagccccacaccaactacttcggcagatgcaacgtgtccgagcacgagaggctgatcctgctgtctcctcacaagcccgaggccaacgatgagctggtcacatacagcctgggcaagttcggacagagagccctggacttctacagcatccacgtgaccagggagagcaatcaccctgtgaagcccctggaacagatcggcggcaatagctgtgcctctggacctgtgggaaaagccctgagcgacgcctgtatgggagccgtggcatccttcctgaccaagtaccaggacatcatcctggaacaccagaaagtgatcaagaagaacgagaaaagactggccaacctcaaggatatcgccagcgctaacggcctggcctttcctaagatcaccctgcctccacagcctcacaccaaagagggcatcgaggcctacaacaacgtggtggcccagatcgtgatttgggtcaacctgaatctgtggcagaagctgaagatcggcagggacgaagccaagccactgcagagactgaagggcttccctagcttccctctggtggaaagacaggccaatgaagtggattggtgggacatggtctgcaacgtgaagaagctgatcaacgagaagaaagaggatggcaaggttttctggcagaacctggccggctacaagagacaagaagccctgaggccttacctgagcagcgaagaggaccggaagaagggcaagaagttcgccagataccagctgggcgacctgctgaagcacctggaaaagaagcacggcgaggactggggcaaagtgtacgatgaggcctgggagagaatcgacaagaaggtggaaggcctgagcaagcacattaagctggaagaggaaagaaggagcgaggacgcccaatctaaagccgctctgaccgattggctgagagccaaggccagctttgtgatcgagggcctgaaagaggccgacaaggacgagttctgcagatgcgagctgaagctgcagaagtggtacggcgatctgagaggcaagcccttcgccattgaggccgagaacagcatcctggacatcagcggcttcagcaagcagtacaactgcgccttcatttggcagaaagacggcgtcaagaaactgaacctgtacctgatcatcaattacttcaaaggcggcaagctgcggttcaagaagatcaaacccgaggccttcgaggctaacagattctacaccgtgatcaacaaaaagtccggcgagatcgtgcccatggaagtgaacttcaacttcgacgaccccaacctgattatcctgcctctggccttcggcaagagacagggcagagagttcatctggaacgatctgctgagcctggaaaccggctctctgaagctggccaatggcagagtgatcgagaaaaccctgtacaacaggagaaccagacaggacgagcctgctctgtttgtggccctgaccttcgagagaagagaggtgctggacagcagcaacatcaagcccatgaacctgatcggcgtggaccggggcgagaatatccctgctgtgatcgccctgacagaccctgaaggatgcccactgagcagattcaaggactccctgggcaaccctacacacatcctgagaatcggcgagagctacaaagagaagcagaggacaatccaggccaagaaagaggtggaacagagaagagccggcggatactctaggaagtacgccagcaaggccaagaatctggccgacgacatggtccgaaacaccgccagagatctgctgtactacgccgtgacacaggacgccatgctgatcttcgagaatctgagcagaggcttcggccggcagggcaagagaacctttatggccgagaggcagtacaccagaatggaagattggctcacagctaaactggcctacgagggactgagcaagacctacctgtccaaaacactggcccagtatacctccaagacctgcagcaattgcggcttcaccatcaccagcgccgactacgacagagtgctggaaaagctcaagaaaaccgccaccggctggatgaccaccatcaacggcaaagagctgaaggttgagggccagatcacctactacaacaggaggaagaggcagaacgtcgtgaaggatctgagcgtggaactggacagactgagcgaagagagcgtgaacaacgacatcagcagctggacaaagggcagatcaggcgaggctctgagcctgctgaagaagaggtttagccacagacctgtgcaagagaagttcgtgtgcctgaactgcggcttcgagacacacgccgatgaacaggctgccctgaacattgccagaagctggctgttcctgagaagccaagagtacaagaagtaccagaccaacaagaccaccggcaacaccgacaagagggcctttgtggaaacctggcagagcttctacagaaaaaagctgaaagaagtctggaagcccgccgtg

SEQ ID NO: 40578 - DNA, 2931 bp, Artificial Sequence
  CasX variant
caagagatcaagagaatcaacaagatcagaaggagactggtcaaggacagcaacacaaagaaggccggcaagacaggccccatgaaaaccctgctcgtcagagtgatgacccctgacctgagagagcggctggaaaacctgagaaagaagcccgagaacatccctcagcctatcagcaacaccagcagggccaacctgaacaagctgctgaccgactacaccgagatgaagaaagccatcctgcacgtgtactgggaagagttccagaaagaccccgtgggcctgatgagcagagttgctcagcctgccagcaagaagatcgaccagaacaagctgaagcccgagatggacgagaagggcaatctgaccacagccggctttgcctgctctcagtgtggccagcctctgttcgtgtacaagctggaacaggtgtccgagaaaggcaaggcctacaccaactacttcggcagatgtaacgtggccgagcacgagaagctgattctgctggcccagctgaaacctgagaaggactctgatgaggccgtgacctacagcctgggcaagtttggacagagagccctggacttctacagcatccacgtgaccaaagaaagcacacaccccgtgaagcccctggctcagatcgccggcaatagatacgcctctggacctgtgggcaaagccctgtccgatgcctgcatgggaacaatcgccagcttcctgagcaagtaccaggacatcatcatcgagcaccagaaggtggtcaagggcaaccagaagagactggaaagcctgagggagctggccggcaaagagaacctggaataccccagcgtgaccctgcctcctcagcctcacacaaaagaaggcgtggacgcctacaacgaagtgatcgccagagtgagaatgtgggtcaacctgaacctgtggcagaagctgaaactgtccagggacgacgccaagcctctgctgagactgaagggcttccctagcttccctctggtggaaagacaggccaatgaagtggattggtgggacatggtctgcaacgtgaagaagctgatcaacgagaagaaagaggatggcaaggttttctggcagaacctggccggctacaagagacaagaagccctgaggccttacctgagcagcgaagaggaccggaagaagggcaagaagttcgccagataccagctgggcgacctgctgctgcacctggaaaagaagcacggcgaggactggggcaaagtgtacgatgaggcctgggagagaatcgacaagaaggtggaaggcctgagcaagcacattaagctggaagaggaaagaaggagcgaggacgcccaatctaaagccgctctgaccgattggctgagagccaaggccagctttgtgatcgagggcctgaaagaggccgacaaggacgagttctgcagatgcgagctgaagctgcagaagtggtacggcgatctgagaggcaagcccttcgccattgaggccgagaacagcatcctggacatcagcggcttcagcaagcagtacaactgcgccttcatttggcagaaagacggcgtcaagaaactgaacctgtacctgatcatcaattacttcaaaggcggcaagctgcggttcaagaagatcaaacccgaggccttcgaggctaacagattctacaccgtgatcaacaaaaagtccggcgagatcgtgcccatggaagtgaacttcaacttcgacgaccccaacctgattatcctgcctctggccttcggcaagagacagggcagagagttcatctggaacgatctgctgagcctggaaaccggctctctgaagctggccaatggcagagtgatcgagaaaaccctgtacaacaggagaaccagacaggacgagcctgctctgtttgtggccctgaccttcgagagaagagaggtgctggacagcagcaacatcaagcccatgaacctgatcggcgtggaccggggcgagaatatccctgctgtgatcgccctgacagaccctgaaggatgcccactgagcagattcaaggactccctgggcaaccctacacacatcctgagaatcggcgagagctacaaagagaagcagaggacaatccaggccaagaaagaggtggaacagcgcagagccggcggatactctaggaagtacgccagcaaggccaagaatctggccgacgacatggtccgaaacaccgccagagatctgctgtactacgccgtgacacaggacgccatgctgatcttcgagaatctgagcagaggcttcggccggcagggcaagagaacctttatggccgagaggcagtacaccagaatggaagattggctcacagctaaactggcctacgagggactgagcaagacctacctgtccaaaacactggcccagtatacctccaagacctgcagcaattgcggcttcaccatcaccagcgccgactacgacagagtgctggaaaagctcaagaaaaccgccaccggctggatgaccaccatcaacggcaaagagctgaaggttgagggccagatcacctactacaacaggtacaagaggcagaacgtcgtgaaggatctgagcgtggaactggacagactgagcgaagagagcgtgaacaacgacatcagcagctggacaaagggcagatcaggcgaggctctgagcctgctgaagaagaggtttagccacagacctgtgcaagagaagttcgtgtgcctgaactgcggcttcgagacacacgccgatgaacaggctgccctgaacattgccagaagctggctgttcctgagaagccaagagtacaagaagtaccagaccaacaagaccaccggcaacaccgacaagagggcctttgtggaaacctggcagagcttctacagaaaaaagctgaaagaagtctggaagcccgccgtg

SEQ ID NO: 40579 - DNA, 2934 bp, Artificial Sequence; identical to SEQ ID NO: 234
  CasX variant

SEQ ID NO: 40580 - DNA, 2934 bp, Artificial Sequence
  CasX variant
caagagatcaagagaatcaacaagatcagaaggagactggtcaaggacagcaacacaaagaaggccggcaagacaggccccatgaaaaccctgctcgtcagagtgatgacccctgacctgagagagcggctggaaaacctgagaaagaagcccgagaacatccctcagcctatcagcaacaccagcagggccaacctgaacaagctgctgaccgactacaccgagatgaagaaagccatcctgcacgtgtactgggaagagttccagaaagaccccgtgggcctgatgagcagagttgctcagcctgccagcaagaagatcgaccagaacaagctgaagcccgagatggacgagaagggcaatctgaccacagccggctttgcctgctctcagtgtggccagcctctgttcgtgtacaagctggaacaggtgtccgagaaaggcaaggcctacaccaactacttcggcagatgtaacgtggccgagcacgagaagctgattctgctggcccagctgaaacctgagaaggactctgatgaggccgtgacctacagcctgggcaagtttggacagagagccctggacttctacagcatccacgtgaccaaagaaagcacacaccccgtgaagcccctggctcagatcgccggcaatagatacgcctcttcccctgtgggcaaagccctgtccgatgcctgcatgggaacaatcgccagcttcctgagcaagtaccaggacatcatcatcgagcaccagaaggtggtcaagggcaaccagaagagactggaaagcctgagggagctggccggcaaagagaacctggaataccccagcgtgaccctgcctcctcagcctcacacaaaagaaggcgtggacgcctacaacgaagtgatcgccagagtgagaatgtgggtcaacctgaacctgtggcagaagctgaaactgtccagggacgacgccaagcctctgctgagactgaagggcttccctagcttccctctggtggaaagacaggccaatgaagtggattggtgggacatggtctgcaacgtgaagaagctgatcaacgagaagaaagaggatggcaaggttttctggcagaacctggccggctacaagagacaagaagccctgaggccttacctgagcagcgaagaggaccggaagaagggcaagaagttcgccagataccagctgggcgacctgctgctgcacctggaaaagaagcacggcgaggactggggcaaagtgtacgatgaggcctgggagagaatcgacaagaaggtggaaggcctgagcaagcacattaagctggaagaggaaagaaggagcgaggacgcccaatctaaagccgctctgaccgattggctgagagccaaggccagctttgtgatcgagggcctgaaagaggccgacaaggacgagttctgcagatgcgagctgaagctgcagaagtggtacggcgatctgagaggcaagcccttcgccattgaggccgagaacagcatcctggacatcagcggcttcagcaagcagtacaactgcgccttcatttggcagaaagacggcgtcaagaaactgaacctgtacctgatcatcaattacttcaaaggcggcaagctgcggttcaagaagatcaaacccgaggccttcgaggctaacagattctacaccgtgatcaacaaaaagtccggcgagatcgtgcccatggaagtgaacttcaacttcgacgaccccaacctgattatcctgcctctggccttcggcaagagacagggcagagagttcatctggaacgatctgctgagcctggaaaccggctctctgaagctggccaatggcagagtgatcgagaaaaccctgtacaacaggagaaccagacaggacgagcctgctctgtttgtggccctgaccttcgagagaagagaggtgctggacagcagcaacatcaagcccatgaacctgatcggcgtggaccggggcgagaatatccctgctgtgatcgccctgacagaccctgaaggatgcccactgagcagattcaaggactccctgggcaaccctacacacatcctgagaatcggcgagagctacaaagagaagcagaggacaatccaggccaagaaagaggtggaacagagaagagccggcggatactctaggaagtacgccagcaaggccaagaatctggccgacgacatggtccgaaacaccgccagagatctgctgtactacgccgtgacacaggacgccatgctgatcttcgagaatctgagcagaggcttcggccggcagggcaagagaacctttatggccgagaggcagtacaccagaatggaagattggctcacagctaaactggcctacgagggactgcccagcaagacctacctgtccaaaacactggcccagtatacctccaagacctgcagcaattgcggcttcaccatcaccagcgccgactacgacagagtgctggaaaagctcaagaaaaccgccaccggctggatgaccaccatcaacggcaaagagctgaaggttgagggccagatcacctactacaacaggtacaagaggcagaacgtcgtgaaggatctgagcgtggaactggacagactgagcgaagagagcgtgaacaacgacatcagcagctggacaaagggcagatcaggcgaggctctgagcctgctgaagaagaggtttagccacagacctgtgcaagagaagttcgtgtgcctgaactgcggcttcgagacacacgccgatgaacaggctgccctgaacattgccagaagctggctgttcctgagaagccaagagtacaagaagtaccagaccaacaagaccaccggcaacaccgacaagagggcctttgtggaaacctggcagagcttctacagaaaaaagctgaaagaagtctggaagcccgccgtg

SEQ ID NO: 40581 - DNA, 2934 bp, Artificial Sequence
  CasX variant
caagagatcaagagaatcaacaagatcagaaggagactggtcaaggacagcaacacaaagaaggccggcaagacaggccccatgaaaaccctgctcgtcagagtgatgacccctgacctgagagagcggctggaaaacctgagaaagaagcccgagaacatccctcagcctatcagcaacaccagcagggccaacctgaacaagctgctgaccgactacaccgagatgaagaaagccatcctgcacgtgtactgggaagagttccagaaagaccccgtgggcctgatgagcagagttgctcagcctgccagcaagaagatcgaccagaacaagctgaagcccgagatggacgagaagggcaatctgaccacagccggctttgcctgctctcagtgtggccagcctctgttcgtgtacaagctggaacaggtgtccgagaaaggcaaggcctacaccaactacttcggcagatgtaacgtggccgagcacgagaagctgattctgctggcccagctgaaacctgagaaggactctgatgaggccgtgacctacagcctgggcaagtttggacagagagccctggacttctacagcatccacgtgaccaaagaaagcacacaccccgtgaagcccctggctcagatcgccggcaatagatacgcctctacccctgtgggcaaagccctgtccgatgcctgcatgggaacaatcgccagcttcctgagcaagtaccaggacatcatcatcgagcaccagaaggtggtcaagggcaaccagaagagactggaaagcctgagggagctggccggcaaagagaacctggaataccccagcgtgaccctgcctcctcagcctcacacaaaagaaggcgtggacgcctacaacgaagtgatcgccagagtgagaatgtgggtcaacctgaacctgtggcagaagctgaaactgtccagggacgacgccaagcctctgctgagactgaagggcttccctagcttccctctggtggaaagacaggccaatgaagtggattggtgggacatggtctgcaacgtgaagaagctgatcaacgagaagaaagaggatggcaaggttttctggcagaacctggccggctacaagagacaagaagccctgaggccttacctgagcagcgaagaggaccggaagaagggcaagaagttcgccagataccagctgggcgacctgctgctgcacctggaaaagaagcacggcgaggactggggcaaagtgtacgatgaggcctgggagagaatcgacaagaaggtggaaggcctgagcaagcacattaagctggaagaggaaagaaggagcgaggacgcccaatctaaagccgctctgaccgattggctgagagccaaggccagctttgtgatcgagggcctgaaagaggccgacaaggacgagttctgcagatgcgagctgaagctgcagaagtggtacggcgatctgagaggcaagcccttcgccattgaggccgagaacagcatcctggacatcagcggcttcagcaagcagtacaactgcgccttcatttggcagaaagacggcgtcaagaaactgaacctgtacctgatcatcaattacttcaaaggcggcaagctgcggttcaagaagatcaaacccgaggccttcgaggctaacagattctacaccgtgatcaacaaaaagtccggcgagatcgtgcccatggaagtgaacttcaacttcgacgaccccaacctgattatcctgcctctggccttcggcaagagacagggcagagagttcatctggaacgatctgctgagcctggaaaccggctctctgaagctggccaatggcagagtgatcgagaaaaccctgtacaacaggagaaccagacaggacgagcctgctctgtttgtggccctgaccttcgagagaagagaggtgctggacagcagcaacatcaagcccatgaacctgatcggcgtggaccggggcgagaatatccctgctgtgatcgccctgacagaccctgaaggatgcccactgagcagattcaaggactccctgggcaaccctacacacatcctgagaatcggcgagagctacaaagagaagcagaggacaatccaggccaagaaagaggtggaacagagaagagccggcggatactctaggaagtacgccagcaaggccaagaatctggccgacgacatggtccgaaacaccgccagagatctgctgtactacgccgtgacacaggacgccatgctgatcttcgagaatctgagcagaggcttcggccggcagggcaagagaacctttatggccgagaggcagtacaccagaatggaagattggctcacagctaaactggcctacgagggactgcccagcaagacctacctgtccaaaacactggcccagtatacctccaagacctgcagcaattgcggcttcaccatcaccagcgccgactacgacagagtgctggaaaagctcaagaaaaccgccaccggctggatgaccaccatcaacggcaaagagctgaaggttgagggccagatcacctactacaacaggtacaagaggcagaacgtcgtgaaggatctgagcgtggaactggacagactgagcgaagagagcgtgaacaacgacatcagcagctggacaaagggcagatcaggcgaggctctgagcctgctgaagaagaggtttagccacagacctgtgcaagagaagttcgtgtgcctgaactgcggcttcgagacacacgccgatgaacaggctgccctgaacattgccagaagctggctgttcctgagaagccaagagtacaagaagtaccagaccaacaagaccaccggcaacaccgacaagagggcctttgtggaaacctggcagagcttctacagaaaaaagctgaaagaagtctggaagcccgccgtg

SEQ ID NO: 40582 - DNA, 2934 bp, Artificial Sequence
  CasX variant
caagagatcaagagaatcaacaagatcagaaggagactggtcaaggacagcaacacaaagaaggccggcaagacaggccccatgaaaaccctgctcgtcagagtgatgacccctgacctgagagagcggctggaaaacctgagaaagaagcccgagaacatccctcagcctatcagcaacaccagcagggccaacctgaacaagctgctgaccgactacaccgagatgaagaaagccatcctgcacgtgtactgggaagagttccagaaagaccccgtgggcctgatgagcagagttgctcagcctgccagcaagaagatcgaccagaacaagctgaagcccgagatggacgagaagggcaatctgaccacagccggctttgcctgctctcagtgtggccagcctctgttcgtgtacaagctggaacaggtgtccgagaaaggcaaggcctacaccaactacttcggcagatgtaacgtggccgagcacgagaagctgattctgctggcccagctgaaacctgagaaggactctgatgaggccgtgacctacagcctgggcaagtttggacagagagccctggacttctacagcatccacgtgaccaaagaaagcacacaccccgtgaagcccctggctcagatcgccggcaatagatacgcctctgcccctgtgggcaaagccctgtccgatgcctgcatgggaacaatcgccagcttcctgagcaagtaccaggacatcatcatcgagcaccagaaggtggtcaagggcaaccagaagagactggaaagcctgagggagctggccggcaaagagaacctggaataccccagcgtgaccctgcctcctcagcctcacacaaaagaaggcgtggacgcctacaacgaagtgatcgccagagtgagaatgtgggtcaacctgaacctgtggcagaagctgaaactgtccagggacgacgccaagcctctgctgagactgaagggcttccctagcttccctctggtggaaagacaggccaatgaagtggattggtgggacatggtctgcaacgtgaagaagctgatcaacgagaagaaagaggatggcaaggttttctggcagaacctggccggctacaagagacaagaagccctgaggccttacctgagcagcgaagaggaccggaagaagggcaagaagttcgccagataccagctgggcgacctgctgctgcacctggaaaagaagcacggcgaggactggggcaaagtgtacgatgaggcctgggagagaatcgacaagaaggtggaaggcctgagcaagcacattaagctggaagaggaaagaaggagcgaggacgcccaatctaaagccgctctgaccgattggctgagagccaaggccagctttgtgatcgagggcctgaaagaggccgacaaggacgagttctgcagatgcgagctgaagctgcagaagtggtacggcgatctgagaggcaagcccttcgccattgaggccgagaacagcatcctggacatcagcggcttcagcaagcagtacaactgcgccttcatttggcagaaagacggcgtcaagaaactgaacctgtacctgatcatcaattacttcaaaggcggcaagctgcggttcaagaagatcaaacccgaggccttcgaggctaacagattctacaccgtgatcaacaaaaagtccggcgagatcgtgcccatggaagtgaacttcaacttcgacgaccccaacctgattatcctgcctctggccttcggcaagagacagggcagagagttcatctggaacgatctgctgagcctggaaaccggctctctgaagctggccaatggcagagtgatcgagaaaaccctgtacaacaggagaaccagacaggacgagcctgctctgtttgtggccctgaccttcgagagaagagaggtgctggacagcagcaacatcaagcccatgaacctgatcggcgtggaccggggcgagaatatccctgctgtgatcgccctgacagaccctgaaggatgcccactgagcagattcaaggactccctgggcaaccctacacacatcctgagaatcggcgagagctacaaagagaagcagaggacaatccaggccaagaaagaggtggaacagagaagagccggcggatactctaggaagtacgccagcaaggccaagaatctggccgacgacatggtccgaaacaccgccagagatctgctgtactacgccgtgacacaggacgccatgctgatcttcgagaatctgagcagaggcttcggccggcagggcaagagaacctttatggccgagaggcagtacaccagaatggaagattggctcacagctaaactggcctacgagggactgcccagcaagacctacctgtccaaaacactggcccagtatacctccaagacctgcagcaattgcggcttcaccatcaccagcgccgactacgacagagtgctggaaaagctcaagaaaaccgccaccggctggatgaccaccatcaacggcaaagagctgaaggttgagggccagatcacctactacaacaggtacaagaggcagaacgtcgtgaaggatctgagcgtggaactggacagactgagcgaagagagcgtgaacaacgacatcagcagctggacaaagggcagatcaggcgaggctctgagcctgctgaagaagaggtttagccacagacctgtgcaagagaagttcgtgtgcctgaactgcggcttcgagacacacgccgatgaacaggctgccctgaacattgccagaagctggctgttcctgagaagccaagagtacaagaagtaccagaccaacaagaccaccggcaacaccgacaagagggcctttgtggaaacctggcagagcttctacagaaaaaagctgaaagaagtctggaagcccgccgtg

SEQ ID NO: 40583 - DNA, 2934 bp, Artificial Sequence
  CasX variant
caagagatcaagagaatcaacaagatcagaaggagactggtcaaggacagcaacacaaagaaggccggcaagacaggccccatgaaaaccctgctcgtcagagtgatgacccctgacctgagagagcggctggaaaacctgagaaagaagcccgagaacatccctcagcctatcagcaacaccagcagggccaacctgaacaagctgctgaccgactacaccgagatgaagaaagccatcctgcacgtgtactgggaagagttccagaaagaccccgtgggcctgatgagcagagttgctcagcctgccagcaagaagatcgaccagaacaagctgaagcccgagatggacgagaagggcaatctgaccacagccggctttgcctgctctcagtgtggccagcctctgttcgtgtacaagctggaacaggtgtccgagaaaggcaaggcctacaccaactacttcggcagatgtaacgtggccgagcacgagaagctgattaagctggcccagctgaaacctgagaaggactctgatgaggccgtgacctacagcctgggcaagtttggacagagagccctggacttctacagcatccacgtgaccaaagaaagcacacaccccgtgaagcccctggctcagatcgccggcaatagatacgcctctggacctgtgggcaaagccctgtccgatgcctgcatgggaacaatcgccagcttcctgagcaagtaccaggacatcatcatcgagcaccagaaggtggtcaagggcaaccagaagagactggaaagcctgagggagctggccggcaaagagaacctggaataccccagcgtgaccctgcctcctcagcctcacacaaaagaaggcgtggacgcctacaacgaagtgatcgccagagtgagaatgtgggtcaacctgaacctgtggcagaagctgaaactgtccagggacgacgccaagcctctgctgagactgaagggcttccctagcttccctctggtggaaagacaggccaatgaagtggattggtgggacatggtctgcaacgtgaagaagctgatcaacgagaagaaagaggatggcaaggttttctggcagaacctggccggctacaagagacaagaagccctgaggccttacctgagcagcgaagaggaccggaagaagggcaagaagttcgccagataccagctgggcgacctgctgctgcacctggaaaagaagcacggcgaggactggggcaaagtgtacgatgaggcctgggagagaatcgacaagaaggtggaaggcctgagcaagcacattaagctggaagaggaaagaaggagcgaggacgcccaatctaaagccgctctgaccgattggctgagagccaaggccagctttgtgatcgagggcctgaaagaggccgacaaggacgagttctgcagatgcgagctgaagctgcagaagtggtacggcgatctgagaggcaagcccttcgccattgaggccgagaacagcatcctggacatcagcggcttcagcaagcagtacaactgcgccttcatttggcagaaagacggcgtcaagaaactgaacctgtacctgatcatcaattacttcaaaggcggcaagctgcggttcaagaagatcaaacccgaggccttcgaggctaacagattctacaccgtgatcaacaaaaagtccggcgagatcgtgcccatggaagtgaacttcaacttcgacgaccccaacctgattatcctgcctctggccttcggcaagagacagggcagagagttcatctggaacgatctgctgagcctggaaaccggctctctgaagctggccaatggcagagtgatcgagaaaaccctgtacaacaggagaaccagacaggacgagcctgctctgtttgtggccctgaccttcgagagaagagaggtgctggacagcagcaacatcaagcccatgaacctgatcggcgtggaccggggcgagaatatccctgctgtgatcgccctgacagaccctgaaggatgcccactgagcagattcaaggactccctgggcaaccctacacacatcctgagaatcggcgagagctacaaagagaagcagaggacaatccaggccaagaaagaggtggaacagagaagagccggcggatactctaggaagtacgccagcaaggccaagaatctggccgacgacatggtccgaaacaccgccagagatctgctgtactacgccgtgacacaggacgccatgctgatcttcgagaatctgagcagaggcttcggccggcagggcaagagaacctttatggccgagaggcagtacaccagaatggaagattggctcacagctaaactggcctacgagggactgcccagcaagacctacctgtccaaaacactggcccagtatacctccaagacctgcagcaattgcggcttcaccatcaccagcgccgactacgacagagtgctggaaaagctcaagaaaaccgccaccggctggatgaccaccatcaacggcaaagagctgaaggttgagggccagatcacctactacaacaggtacaagaggcagaacgtcgtgaaggatctgagcgtggaactggacagactgagcgaagagagcgtgaacaacgacatcagcagctggacaaagggcagatcaggcgaggctctgagcctgctgaagaagaggtttagccacagacctgtgcaagagaagttcgtgtgcctgaactgcggcttcgagacacacgccgatgaacaggctgccctgaacattgccagaagctggctgttcctgagaagccaagagtacaagaagtaccagaccaacaagaccaccggcaacaccgacaagagggcctttgtggaaacctggcagagcttctacagaaaaaagctgaaagaagtctggaagcccgccgtg

SEQ ID NO: 40584 - DNA, 2937 bp, Artificial Sequence
  CasX variant
caagagatcaagagaatcaacaagatcagaaggagactggtcaaggacagcaacacaaagaaggccggcaagacacggggccccatgaaaaccctgctcgtcagagtgatgacccctgacctgagagagcggctggaaaacctgagaaagaagcccgagaacatccctcagcctatcagcaacaccagcagggccaacctgaacaagctgctgaccgactacaccgagatgaagaaagccatcctgcacgtgtactgggaagagttccagaaagaccccgtgggcctgatgagcagagttgctcagcctgccagcaagaagatcgaccagaacaagctgaagcccgagatggacgagaagggcaatctgaccacagccggctttgcctgctctcagtgtggccagcctctgttcgtgtacaagctggaacaggtgtccgagaaaggcaaggcctacaccaactacttcggcagatgtaacgtggccgagcacgagaagctgattctgctggcccagctgaaacctgagaaggactctgatgaggccgtgacctacagcctgggcaagtttggacagagagccctggacttctacagcatccacgtgaccaaagaaagcacacaccccgtgaagcccctggctcagatcgccggcaatagatacgcctcttcccctgtgggcaaagccctgtccgatgcctgcatgggaacaatcgccagcttcctgagcaagtaccaggacatcatcatcgagcaccagaaggtggtcaagggcaaccagaagagactggaaagcctgagggagctggccggcaaagagaacctggaataccccagcgtgaccctgcctcctcagcctcacacaaaagaaggcgtggacgcctacaacgaagtgatcgccagagtgagaatgtgggtcaacctgaacctgtggcagaagctgaaactgtccagggacgacgccaagcctctgctgagactgaagggcttccctagcttccctctggtggaaagacaggccaatgaagtggattggtgggacatggtctgcaacgtgaagaagctgatcaacgagaagaaagaggatggcaaggttttctggcagaacctggccggctacaagagacaagaagccctgaggccttacctgagcagcgaagaggaccggaagaagggcaagaagttcgccagataccagctgggcgacctgctgctgcacctggaaaagaagcacggcgaggactggggcaaagtgtacgatgaggcctgggagagaatcgacaagaaggtggaaggcctgagcaagcacattaagctggaagaggaaagaaggagcgaggacgcccaatctaaagccgctctgaccgattggctgagagccaaggccagctttgtgatcgagggcctgaaagaggccgacaaggacgagttctgcagatgcgagctgaagctgcagaagtggtacggcgatctgagaggcaagcccttcgccattgaggccgagaacagcatcctggacatcagcggcttcagcaagcagtacaactgcgccttcatttggcagaaagacggcgtcaagaaactgaacctgtacctgatcatcaattacttcaaaggcggcaagctgcggttcaagaagatcaaacccgaggccttcgaggctaacagattctacaccgtgatcaacaaaaagtccggcgagatcgtgcccatggaagtgaacttcaacttcgacgaccccaacctgattatcctgcctctggccttcggcaagagacagggcagagagttcatctggaacgatctgctgagcctggaaaccggctctctgaagctggccaatggcagagtgatcgagaaaaccctgtacaacaggagaaccagacaggacgagcctgctctgtttgtggccctgaccttcgagagaagagaggtgctggacagcagcaacatcaagcccatgaacctgatcggcgtggaccggggcgagaatatccctgctgtgatcgccctgacagaccctgaaggatgcccactgagcagattcaaggactccctgggcaaccctacacacatcctgagaatcggcgagagctacaaagagaagcagaggacaatccaggccaagaaagaggtggaacagagaagagccggcggatactctaggaagtacgccagcaaggccaagaatctggccgacgacatggtccgaaacaccgccagagatctgctgtactacgccgtgacacaggacgccatgctgatcttcgagaatctgagcagaggcttcggccggcagggcaagagaacctttatggccgagaggcagtacaccagaatggaagattggctcacagctaaactggcctacgagggactgcccagcaagacctacctgtccaaaacactggcccagtatacctccaagacctgcagcaattgcggcttcaccatcaccagcgccgactacgacagagtgctggaaaagctcaagaaaaccgccaccggctggatgaccaccatcaacggcaaagagctgaaggttgagggccagatcacctactacaacaggtacaagaggcagaacgtcgtgaaggatctgagcgtggaactggacagactgagcgaagagagcgtgaacaacgacatcagcagctggacaaagggcagatcaggcgaggctctgagcctgctgaagaagaggtttagccacagacctgtgcaagagaagttcgtgtgcctgaactgcggcttcgagacacacgccgatgaacaggctgccctgaacattgccagaagctggctgttcctgagaagccaagagtacaagaagtaccagaccaacaagaccaccggcaacaccgacaagagggcctttgtggaaacctggcagagcttctacagaaaaaagctgaaagaagtctggaagcccgccgtg

SEQ ID NO: 40585 - DNA, 2934 bp, Artificial Sequence
  CasX variant
caagagatcaagagaatcaacaagatcagaaggagactggtcaaggacagcaacacaaagaaggccggcaagacaggccccatgaaaaccctgctcgtcagagtgatgacccctgacctgagagagcggctggaaaacctgagaaagaagcccgagaacatccctcagcctatcagcaacaccagcagggccaacctgaacaagctgctgaccgactacaccgagatgaagaaagccatcctgcacgtgtactgggaagagttccagaaagaccccgtgggcctgatgagcagagttgctcagcctgccagcaagaagatcgaccagaacaagctgaagcccgagatggacgagaagggcaatctgaccacagccggctttgcctgctctcagtgtggccagcctctgttcgtgtacaagctggaacaggtgtccgagaaaggcaaggcctacaccaactacttcggcagatgtaacgtggccgagcacgagaagctgattaagctggcccagctgaaacctgagaaggactctgatgaggccgtgacctacagcctgggcaagtttggacagagagccctggacttctacagcatccacgtgaccaaagaaagcacacaccccgtgaagcccctggctcagatcgccggcaatagatacgcctcttcccctgtgggcaaagccctgtccgatgcctgcatgggaacaatcgccagcttcctgagcaagtaccaggacatcatcatcgagcaccagaaggtggtcaagggcaaccagaagagactggaaagcctgagggagctggccggcaaagagaacctggaataccccagcgtgaccctgcctcctcagcctcacacaaaagaaggcgtggacgcctacaacgaagtgatcgccagagtgagaatgtgggtcaacctgaacctgtggcagaagctgaaactgtccagggacgacgccaagcctctgctgagactgaagggcttccctagcttccctctggtggaaagacaggccaatgaagtggattggtgggacatggtctgcaacgtgaagaagctgatcaacgagaagaaagaggatggcaaggttttctggcagaacctggccggctacaagagacaagaagccctgaggccttacctgagcagcgaagaggaccggaagaagggcaagaagttcgccagataccagctgggcgacctgctgctgcacctggaaaagaagcacggcgaggactggggcaaagtgtacgatgaggcctgggagagaatcgacaagaaggtggaaggcctgagcaagcacattaagctggaagaggaaagaaggagcgaggacgcccaatctaaagccgctctgaccgattggctgagagccaaggccagctttgtgatcgagggcctgaaagaggccgacaaggacgagttctgcagatgcgagctgaagctgcagaagtggtacggcgatctgagaggcaagcccttcgccattgaggccgagaacagcatcctggacatcagcggcttcagcaagcagtacaactgcgccttcatttggcagaaagacggcgtcaagaaactgaacctgtacctgatcatcaattacttcaaaggcggcaagctgcggttcaagaagatcaaacccgaggccttcgaggctaacagattctacaccgtgatcaacaaaaagtccggcgagatcgtgcccatggaagtgaacttcaacttcgacgaccccaacctgattatcctgcctctggccttcggcaagagacagggcagagagttcatctggaacgatctgctgagcctggaaaccggctctctgaagctggccaatggcagagtgatcgagaaaaccctgtacaacaggagaaccagacaggacgagcctgctctgtttgtggccctgaccttcgagagaagagaggtgctggacagcagcaacatcaagcccatgaacctgatcggcgtggaccggggcgagaatatccctgctgtgatcgccctgacagaccctgaaggatgcccactgagcagattcaaggactccctgggcaaccctacacacatcctgagaatcggcgagagctacaaagagaagcagaggacaatccaggccaagaaagaggtggaacagagaagagccggcggatactctaggaagtacgccagcaaggccaagaatctggccgacgacatggtccgaaacaccgccagagatctgctgtactacgccgtgacacaggacgccatgctgatcttcgagaatctgagcagaggcttcggccggcagggcaagagaacctttatggccgagaggcagtacaccagaatggaagattggctcacagctaaactggcctacgagggactgcccagcaagacctacctgtccaaaacactggcccagtatacctccaagacctgcagcaattgcggcttcaccatcaccagcgccgactacgacagagtgctggaaaagctcaagaaaaccgccaccggctggatgaccaccatcaacggcaaagagctgaaggttgagggccagatcacctactacaacaggtacaagaggcagaacgtcgtgaaggatctgagcgtggaactggacagactgagcgaagagagcgtgaacaacgacatcagcagctggacaaagggcagatcaggcgaggctctgagcctgctgaagaagaggtttagccacagacctgtgcaagagaagttcgtgtgcctgaactgcggcttcgagacacacgccgatgaacaggctgccctgaacattgccagaagctggctgttcctgagaagccaagagtacaagaagtaccagaccaacaagaccaccggcaacaccgacaagagggcctttgtggaaacctggcagagcttctacagaaaaaagctgaaagaagtctggaagcccgccgtg

SEQ ID NO: 40586 - DNA, 2937 bp, Artificial Sequence
  CasX variant
caagagatcaagagaatcaacaagatcagaaggagactggtcaaggacagcaacacaaagaaggccggcaagacacggggccccatgaaaaccctgctcgtcagagtgatgacccctgacctgagagagcggctggaaaacctgagaaagaagcccgagaacatccctcagcctatcagcaacaccagcagggccaacctgaacaagctgctgaccgactacaccgagatgaagaaagccatcctgcacgtgtactgggaagagttccagaaagaccccgtgggcctgatgagcagagttgctcagcctgccagcaagaagatcgaccagaacaagctgaagcccgagatggacgagaagggcaatctgaccacagccggctttgcctgctctcagtgtggccagcctctgttcgtgtacaagctggaacaggtgtccgagaaaggcaaggcctacaccaactacttcggcagatgtaacgtggccgagcacgagaagctgattctgctggcccagctgaaacctgagaaggactctgatgaggccgtgacctacagcctgggcaagtttggacagagagccctggacttctacagcatccacgtgaccaaagaaagcacacaccccgtgaagcccctggctcagatcgccggcaatagatacgcctctggacctgtgggcaaagccctgtccggcgcctgcatgggaacaatcgccagcttcctgagcaagtaccaggacatcatcatcgagcaccagaaggtggtcaagggcaaccagaagagactggaaagcctgagggagctggccggcaaagagaacctggaataccccagcgtgaccctgcctcctcagcctcacacaaaagaaggcgtggacgcctacaacgaagtgatcgccagagtgagaatgtgggtcaacctgaacctgtggcagaagctgaaactgtccagggacgacgccaagcctctgctgagactgaagggcttccctagcttccctctggtggaaagacaggccaatgaagtggattggtgggacatggtctgcaacgtgaagaagctgatcaacgagaagaaagaggatggcaaggttttctggcagaacctggccggctacaagagacaagaagccctgaggccttacctgagcagcgaagaggaccggaagaagggcaagaagttcgccagataccagctgggcgacctgctgctgcacctggaaaagaagcacggcgaggactggggcaaagtgtacgatgaggcctgggagagaatcgacaagaaggtggaaggcctgagcaagcacattaagctggaagaggaaagaaggagcgaggacgcccaatctaaagccgctctgaccgattggctgagagccaaggccagctttgtgatcgagggcctgaaagaggccgacaaggacgagttctgcagatgcgagctgaagctgcagaagtggtacggcgatctgagaggcaagcccttcgccattgaggccgagaacagcatcctggacatcagcggcttcagcaagcagtacaactgcgccttcatttggcagaaagacggcgtcaagaaactgaacctgtacctgatcatcaattacttcaaaggcggcaagctgcggttcaagaagatcaaacccgaggccttcgaggctaacagattctacaccgtgatcaacaaaaagtccggcgagatcgtgcccatggaagtgaacttcaacttcgacgaccccaacctgattatcctgcctctggccttcggcaagagacagggcagagagttcatctggaacgatctgctgagcctggaaaccggctctctgaagctggccaatggcagagtgatcgagaaaaccctgtacaacaggagaaccagacaggacgagcctgctctgtttgtggccctgaccttcgagagaagagaggtgctggacagcagcaacatcaagcccatgaacctgatcggcgtggaccggggcgagaatatccctgctgtgatcgccctgacagaccctgaaggatgcccactgagcagattcaaggactccctgggcaaccctacacacatcctgagaatcggcgagagctacaaagagaagcagaggacaatccaggccaagaaagaggtggaacagagaagagccggcggatactctaggaagtacgccagcaaggccaagaatctggccgacgacatggtccgaaacaccgccagagatctgctgtactacgccgtgacacaggacgccatgctgatcttcgagaatctgagcagaggcttcggccggcagggcaagagaacctttatggccgagaggcagtacaccagaatggaagattggctcacagctaaactggcctacgagggactgcccagcaagacctacctgtccaaaacactggcccagtatacctccaagacctgcagcaattgcggcttcaccatcaccagcgccgactacgacagagtgctggaaaagctcaagaaaaccgccaccggctggatgaccaccatcaacggcaaagagctgaaggttgagggccagatcacctactacaacaggtacaagaggcagaacgtcgtgaaggatctgagcgtggaactggacagactgagcgaagagagcgtgaacaacgacatcagcagctggacaaagggcagatcaggcgaggctctgagcctgctgaagaagaggtttagccacagacctgtgcaagagaagttcgtgtgcctgaactgcggcttcgagacacacgccgatgaacaggctgccctgaacattgccagaagctggctgttcctgagaagccaagagtacaagaagtaccagaccaacaagaccaccggcaacaccgacaagagggcctttgtggaaacctggcagagcttctacagaaaaaagctgaaagaagtctggaagcccgccgtg

SEQ ID NO: 40587 - DNA, 2937 bp, Artificial Sequence
  CasX variant
caagagatcaagagaatcaacaagatcagaaggagactggtcaaggacagcaacacaaagaaggccggcaagacacggggccccatgaaaaccctgctcgtcagagtgatgacccctgacctgagagagcggctggaaaacctgagaaagaagcccgagaacatccctcagcctatcagcaacaccagcagggccaacctgaacaagctgctgaccgactacaccgagatgaagaaagccatcctgcacgtgtactgggaagagttccagaaagaccccgtgggcctgatgagcagagttgctcagcctgccagcaagaagatcgaccagaacaagctgaagcccgagatggacgagaagggcaatctgaccacagccggctttgcctgctctcagtgtggccagcctctgttcgtgtacaagctggaacaggtgtccgagaaaggcaaggcctacaccaactacttcggcagatgtaacgtggccgagcacgagaagctgattctgctggcccagctgaaacctgagaaggactctgatgaggccgtgacctacagcctgggcaagtttggacagagagccctggacttctacagcatccacgtgaccaaagaaagcacacaccccgtgaagcccctggctcagatcgccggcaatagatacgcctcttcccctgtgggcaaagccctgtccggcgcctgcatgggaacaatcgccagcttcctgagcaagtaccaggacatcatcatcgagcaccagaaggtggtcaagggcaaccagaagagactggaaagcctgagggagctggccggcaaagagaacctggaataccccagcgtgaccctgcctcctcagcctcacacaaaagaaggcgtggacgcctacaacgaagtgatcgccagagtgagaatgtgggtcaacctgaacctgtggcagaagctgaaactgtccagggacgacgccaagcctctgctgagactgaagggcttccctagcttccctctggtggaaagacaggccaatgaagtggattggtgggacatggtctgcaacgtgaagaagctgatcaacgagaagaaagaggatggcaaggttttctggcagaacctggccggctacaagagacaagaagccctgaggccttacctgagcagcgaagaggaccggaagaagggcaagaagttcgccagataccagctgggcgacctgctgctgcacctggaaaagaagcacggcgaggactggggcaaagtgtacgatgaggcctgggagagaatcgacaagaaggtggaaggcctgagcaagcacattaagctggaagaggaaagaaggagcgaggacgcccaatctaaagccgctctgaccgattggctgagagccaaggccagctttgtgatcgagggcctgaaagaggccgacaaggacgagttctgcagatgcgagctgaagctgcagaagtggtacggcgatctgagaggcaagcccttcgccattgaggccgagaacagcatcctggacatcagcggcttcagcaagcagtacaactgcgccttcatttggcagaaagacggcgtcaagaaactgaacctgtacctgatcatcaattacttcaaaggcggcaagctgcggttcaagaagatcaaacccgaggccttcgaggctaacagattctacaccgtgatcaacaaaaagtccggcgagatcgtgcccatggaagtgaacttcaacttcgacgaccccaacctgattatcctgcctctggccttcggcaagagacagggcagagagttcatctggaacgatctgctgagcctggaaaccggctctctgaagctggccaatggcagagtgatcgagaaaaccctgtacaacaggagaaccagacaggacgagcctgctctgtttgtggccctgaccttcgagagaagagaggtgctggacagcagcaacatcaagcccatgaacctgatcggcgtggaccggggcgagaatatccctgctgtgatcgccctgacagaccctgaaggatgcccactgagcagattcaaggactccctgggcaaccctacacacatcctgagaatcggcgagagctacaaagagaagcagaggacaatccaggccaagaaagaggtggaacagagaagagccggcggatactctaggaagtacgccagcaaggccaagaatctggccgacgacatggtccgaaacaccgccagagatctgctgtactacgccgtgacacaggacgccatgctgatcttcgagaatctgagcagaggcttcggccggcagggcaagagaacctttatggccgagaggcagtacaccagaatggaagattggctcacagctaaactggcctacgagggactgcccagcaagacctacctgtccaaaacactggcccagtatacctccaagacctgcagcaattgcggcttcaccatcaccagcgccgactacgacagagtgctggaaaagctcaagaaaaccgccaccggctggatgaccaccatcaacggcaaagagctgaaggttgagggccagatcacctactacaacaggtacaagaggcagaacgtcgtgaaggatctgagcgtggaactggacagactgagcgaagagagcgtgaacaacgacatcagcagctggacaaagggcagatcaggcgaggctctgagcctgctgaagaagaggtttagccacagacctgtgcaagagaagttcgtgtgcctgaactgcggcttcgagacacacgccgatgaacaggctgccctgaacattgccagaagctggctgttcctgagaagccaagagtacaagaagtaccagaccaacaagaccaccggcaacaccgacaagagggcctttgtggaaacctggcagagcttctacagaaaaaagctgaaagaagtctggaagcccgccgtg

SEQ ID NO: 40588 - DNA, 2937 bp, Artificial Sequence
  CasX variant
caagagatcaagagaatcaacaagatcagaaggagactggtcaaggacagcaacacaaagaaggccggcaagacacggggccccatgaaaaccctgctcgtcagagtgatgacccctgacctgagagagcggctggaaaacctgagaaagaagcccgagaacatccctcagcctatcagcaacaccagcagggccaacctgaacaagctgctgaccgactacaccgagatgaagaaagccatcctgcacgtgtactgggaagagttccagaaagaccccgtgggcctgatgagcagagttgctcagcctgccagcaagaagatcgaccagaacaagctgaagcccgagatggacgagaagggcaatctgaccacagccggctttgcctgctctcagtgtggccagcctctgttcgtgtacaagctggaacaggtgtccgagaaaggcaaggcctacaccaactacttcggcagatgtaacgtggccgagcacgagaagctgattaagctggcccagctgaaacctgagaaggactctgatgaggccgtgacctacagcctgggcaagtttggacagagagccctggacttctacagcatccacgtgaccaaagaaagcacacaccccgtgaagcccctggctcagatcgccggcaatagatacgcctcttcccctgtgggcaaagccctgtccgatgcctgcatgggaacaatcgccagcttcctgagcaagtaccaggacatcatcatcgagcaccagaaggtggtcaagggcaaccagaagagactggaaagcctgagggagctggccggcaaagagaacctggaataccccagcgtgaccctgcctcctcagcctcacacaaaagaaggcgtggacgcctacaacgaagtgatcgccagagtgagaatgtgggtcaacctgaacctgtggcagaagctgaaactgtccagggacgacgccaagcctctgctgagactgaagggcttccctagcttccctctggtggaaagacaggccaatgaagtggattggtgggacatggtctgcaacgtgaagaagctgatcaacgagaagaaagaggatggcaaggttttctggcagaacctggccggctacaagagacaagaagccctgaggccttacctgagcagcgaagaggaccggaagaagggcaagaagttcgccagataccagctgggcgacctgctgctgcacctggaaaagaagcacggcgaggactggggcaaagtgtacgatgaggcctgggagagaatcgacaagaaggtggaaggcctgagcaagcacattaagctggaagaggaaagaaggagcgaggacgcccaatctaaagccgctctgaccgattggctgagagccaaggccagctttgtgatcgagggcctgaaagaggccgacaaggacgagttctgcagatgcgagctgaagctgcagaagtggtacggcgatctgagaggcaagcccttcgccattgaggccgagaacagcatcctggacatcagcggcttcagcaagcagtacaactgcgccttcatttggcagaaagacggcgtcaagaaactgaacctgtacctgatcatcaattacttcaaaggcggcaagctgcggttcaagaagatcaaacccgaggccttcgaggctaacagattctacaccgtgatcaacaaaaagtccggcgagatcgtgcccatggaagtgaacttcaacttcgacgaccccaacctgattatcctgcctctggccttcggcaagagacagggcagagagttcatctggaacgatctgctgagcctggaaaccggctctctgaagctggccaatggcagagtgatcgagaaaaccctgtacaacaggagaaccagacaggacgagcctgctctgtttgtggccctgaccttcgagagaagagaggtgctggacagcagcaacatcaagcccatgaacctgatcggcgtggaccggggcgagaatatccctgctgtgatcgccctgacagaccctgaaggatgcccactgagcagattcaaggactccctgggcaaccctacacacatcctgagaatcggcgagagctacaaagagaagcagaggacaatccaggccaagaaagaggtggaacagagaagagccggcggatactctaggaagtacgccagcaaggccaagaatctggccgacgacatggtccgaaacaccgccagagatctgctgtactacgccgtgacacaggacgccatgctgatcttcgagaatctgagcagaggcttcggccggcagggcaagagaacctttatggccgagaggcagtacaccagaatggaagattggctcacagctaaactggcctacgagggactgcccagcaagacctacctgtccaaaacactggcccagtatacctccaagacctgcagcaattgcggcttcaccatcaccagcgccgactacgacagagtgctggaaaagctcaagaaaaccgccaccggctggatgaccaccatcaacggcaaagagctgaaggttgagggccagatcacctactacaacaggtacaagaggcagaacgtcgtgaaggatctgagcgtggaactggacagactgagcgaagagagcgtgaacaacgacatcagcagctggacaaagggcagatcaggcgaggctctgagcctgctgaagaagaggtttagccacagacctgtgcaagagaagttcgtgtgcctgaactgcggcttcgagacacacgccgatgaacaggctgccctgaacattgccagaagctggctgttcctgagaagccaagagtacaagaagtaccagaccaacaagaccaccggcaacaccgacaagagggcctttgtggaaacctggcagagcttctacagaaaaaagctgaaagaagtctggaagcccgccgtg

SEQ ID NO: 40589 - DNA, 825 bp, Artificial Sequence
  RHO promoter
agatcttccccacctagccacctggcaaactgctccttctctcaaaggcccaaacatggcctcccagactgcaacccccaggcagtcaggccctgtctccacaacctcacagccaccctggacggaatctgcttcttcccacatttgagtcctcctcagcccctgagctcctctgggcagggctgtttctttccatctttgtattcccaggggcctgcaaataaatgtttaatgaacgaacaagagagtgaattccaattccatgcaacaaggattgggctcctgggccctaggctatgtgtctggcaccagaaacggaagctgcaggttgcagcccctgccctcatggagctcctcctgtcagaggagtgtggggactggatgactccagaggtaacttgtgggggaacgaacaggtaaggggctgtgtgacgagatgagagactgggagaataaaccagaaagtctctagctgtccagaggacatagcacagaggcccatggtccctatttcaaacccaggccaccagactgagctgggaccttgggacagacaagtcatgcagaagttaggggaccttctcctcccttttcctggatcctgagtacctctcctccctgacctcaggcttcctcctagtgtcaccttggcccctcttagaagccaattaggccctcagtttctgcagcggggattaatatgattatgaacacccccaatctcccagatgctgattcagccaggagcttaggagggggaggtcactttataagggtctgggggggtcagaacccagagtcatcccctgaattctgcagatatcc

SEQ ID NO: 40590 - DNA, 805 bp, Artificial Sequence
  RHO535-CAG promoter
cctcatggagctcctcctgtcagaggagtgtggggactggatgactccagaggtaacttgtgggggaacgaacaggtaaggggctgtgtgacgagatgagagactgggagaataaaccagaaagtctctagctgtccagaggacatagcacagaggcccatggtccctatttcaaacccaggccaccagactgagctgggaccttgggacagacaagtcatgcagaagttaggggaccttctcctcccttttcctggatcctgagtacctctcctccctgacctcaggcttcctcctagtgtcaccttggcccctcttagaagccaattaggccctcagtttctgcagcggggattaatatgattatgaacacccccaatctcccagatgctgattcagccaggagcttaggagggggaggtcactttataagggtctgggggggtcagaacccagagtcatccagctggagccctgagtggctgagctcaggccttcgcagcattcttgggtgggagcagccacgggtcagccacaaccacgttctgcttcactctccccatctccccccccctccccacccccaattttgtatttatttattttttaattattttgtgcagcgatgggggcggggggggggggggggcgcgcgccaggcggggcggggcggggcgaggggcggggcggggcgaggcggagaggtgcggcggcagccaatcagagcggcgcgctccgaaagtttccttttatggcgaggcggcggcggcggcggccctataaaaagcgaagcgcgcggcgggcg

SEQ ID NO: 40591 - DNA, 1022 bp, Artificial Sequence
  RHO-intron promoter
agatcttccccacctagccacctggcaaactgctccttctctcaaaggcccaaacatggcctcccagactgcaacccccaggcagtcaggccctgtctccacaacctcacagccaccctggacggaatctgcttcttcccacatttgagtcctcctcagcccctgagctcctctgggcagggctgtttctttccatctttgtattcccaggggcctgcaaataaatgtttaatgaacgaacaagagagtgaattccaattccatgcaacaaggattgggctcctgggccctaggctatgtgtctggcaccagaaacggaagctgcaggttgcagcccctgccctcatggagctcctcctgtcagaggagtgtggggactggatgactccagaggtaacttgtgggggaacgaacaggtaaggggctgtgtgacgagatgagagactgggagaataaaccagaaagtctctagctgtccagaggacatagcacagaggcccatggtccctatttcaaacccaggccaccagactgagctgggaccttgggacagacaagtcatgcagaagttaggggaccttctcctcccttttcctggatcctgagtacctctcctccctgacctcaggcttcctcctagtgtcaccttggcccctcttagaagccaattaggccctcagtttctgcagcggggattaatatgattatgaacacccccaatctcccagatgctgattcagccaggagcttaggagggggaggtcactttataagggtctgggggggtcagaacccagagtcatcccctgaattctgcagatatccatcacactgcgaggaactgaaaaaccagaaagttaactggtaagtttagtctttttgtcttttatttcaggtcccggatccggtggtggtgcaaatcaaagaactgctcctcagtggatgttgcctttacttctaggcctgtacggaagtgttacttctgctctaaaagctgcggaattgtacccgcggccgatcca

SEQ ID NO: 40592 - DNA, 292 bp, Artificial Sequence
  GRK promoter
gggccccagaagcctggtggttgtttgtccttctcaggggaaaagtgaggcggccccttggaggaaggggccgggcagaatgatctaatcggattccaagcagctcaggggattgtctttttctagcaccttcttgccactcctaagcgtcctccgtgaccccggctgggatttcgcctggtgctgtgtcagccccggtctcccaggggcttcccagtggtccccaggaaccctcgacagggcccggtctctctcgtccagcaagggcagggacgggccacaggccaagggc

SEQ ID NO: 40593 - DNA, 510 bp, Artificial Sequence
  GRK-SV40 promoter
gctagcaagatccaagctcagatctcgatcgagttgggccccagaagcctggtggttgtttgtccttctcaggggaaaagtgaggcggccccttggaggaaggggccgggcagaatgatctaatcggattccaagcagctcaggggattgtctttttctagcaccttcttgccactcctaagcgtcctccgtgaccccggctgggatttagcctggtgctgtgtcagccccggtctcccaggggcttcccagtggtccccaggaaccctcgacagggcccggtctctctcgtccagcaagggcagggacgggccacaggccaagggccctcgatcgaggaactgaaaaaccagaaagttaactggtaagtttagtctttttgtcttttatttcaggtcccggatccggtggtggtgcaaatcaaagaactgctcctcagtggatgttgcctttacttctaggcctgtacggaagtgttacttctgctctaaaagctgcggaattgtaccc

SEQ ID NO: 40594 - DNA, 560 bp, Artificial Sequence
  GRK-CAG promoter
gggccccagaagcctggtggttgtttgtccttctcaggggaaaagtgaggcggccccttggaggaaggggccgggcagaatgatctaatcggattccaagcagctcaggggattgtctttttctagcaccttcttgccactcctaagcgtcctccgtgaccccggctgggatttcgcctggtgctgtgtcagccccggtctcccaggggcttcccagtggtccccaggaaccctcgacagggcccggtctctctcgtccagcaagggcagggacgggccacaggccaagggcaccacgttctgcttcactctccccatctccccccccctccccacccccaattttgtatttatttattttttaattattttgtgcagcgatgggggcggggggggggggggggcgcgcgccaggcggggcggggcggggcgaggggcggggcggggcgaggcggagaggtgcggcggcagccaatcagagcggcgcgctccgaaagtttccttttatggcgaggcggcggcggcggcggccctataaaaagcgaagcgcgcggcgggcg

SEQ ID NO: 40595 - DNA, 62 bp, Artificial Sequence
  NGS primer sequence Rho exon-F
  misc_feature (34)..(40): n is any nucleotide
acactctttccctacacgacgctcttccgatctnnnnnnngcagccttggtctctgtctacg

SEQ ID NO: 40596 - DNA, 57 bp, Artificial Sequence
  NGS primer sequence Rho exon-R
gtgactggagttcagacgtgtgctcttccgatctgccccagtctctctgctcatacc

SEQ ID NO: 40597 - DNA, 73 bp, Artificial Sequence
  NGS primer sequence GFP-F
  misc_feature (34)..(49): n is any nucleotide
acactctttccctacacgacgctcttccgatctnnnnnnnnnnnnnnnngacgtaaacggccacaagttcagc

SEQ ID NO: 40598 - DNA, 58 bp, Artificial Sequence
  NGS primer sequence GFP-R
gtgactggagttcagacgtgtgctcttccgatctcgttcttctgcttgtcggccatga

SEQ ID NO: 40599 - DNA, 54 bp, Artificial Sequence
  casX intron sequence
gtggcccaggcaggcagacccaccaggggtccctgaaggccagcccttgagaag

SEQ ID NO: 40600 - DNA, 67 bp, Artificial Sequence
  casX intron sequence
gtcatacaactttcctgaagttgtatgacctctctgagccttagtctcctcgtttgtaaaatgagag

SEQ ID NO: 40601 - DNA, 62 bp, Artificial Sequence
  casX intron sequence
gtaagagcatagtgcacaggactgctggtggccaggaggcccagccctggatcttcctccag

SEQ ID NO: 40602 - DNA, 49 bp, Artificial Sequence
  casX intron sequence
gtatgagacaccacacctgcccatttttgtttggttttttaatgggcag

SEQ ID NO: 40603 - DNA, 59 bp, Artificial Sequence
  casX intron sequence
gtacaaatatatatcaaattcatagatatctattggtacctcatataagtaccatagag

SEQ ID NO: 40604 - DNA, 67 bp, Artificial Sequence
  casX intron sequence
gttccggagccccggcgcgggcgggttctggggtgtagacgctgctggccagcccgccccagccgag

SEQ ID NO: 40605 - DNA, 66 bp, Artificial Sequence
  casX intron sequence
gtgtttgacggcatcccaccgccctacgacaagaaaaagcggatggtggttcctgctgccctcaag

SEQ ID NO: 40606 - DNA, 86 bp, Artificial Sequence
  casX intron sequence
gtcgccaggtagggctgggggccgagggaccggctcgggggcgggggggaagtgtgcctgaccggtctctgtcctcagcgagggag

SEQ ID NO: 40607 - DNA, 67 bp, Artificial Sequence
  casX intron sequence
gtgggtcccagccccgcccgctgcccggccgccccgcaggtcccccgtgacaccggctcctcctcag

SEQ ID NO: 40608 - DNA, 70 bp, Artificial Sequence
  casX intron sequence
gtaagtgcagaggctggcagagggcagcccatgcccccacctgccacctcacaagcctctcctcccacag

SEQ ID NO: 40609 - DNA, 476 bp, Artificial Sequence
  casX intron sequence
gtgagtctatgggacccttgatgttttctttccccttcttttctatggttaagttcatgtcataggaaggggagaagtaacagggtacacatattgaccaaatcagggtaattttgcatttgtaattttaaaaaatgctttcttcttttaatatacttttttgtttatcttatttctaatactttccctaatctctttctttcagggcaataatgatacaatgtatcatgcctctttgcaccattctaaagaataacagtgataatttctgggttaaggcaatagcaatatttctgcatataaatatttctgcatataaattgtaactgatgtaagaggtttcatattgctaatagcagctacaatccagctaccattctgcttttattttatggttgggataaggctggattattctgagtccaagctaggcccttttgctaatcatgttcatacctcttatcttcctcccacag

SEQ ID NO: 40610 - DNA, 69 bp, Artificial Sequence
  casX intron sequence
gtaagtggagactagggggctggggttgcaccctcccagtctgactcctcactgccgccgcctcctcag

SEQ ID NO: 40611 - DNA, 69 bp, Artificial Sequence
  casX intron sequence
gtgagctggcgcccccagggcggctccgggcccaggcccgtccagggcataaccccctgtctcccctag

SEQ ID NO: 40612 - DNA, 70 bp, Artificial Sequence
  casX intron sequence
gtaggcgcctggggcgggcaggagggtacacgggcgtaaactgagtctcaccgctttcctctccctgcag

SEQ ID NO: 40613 - DNA, 70 bp, Artificial Sequence
  casX intron sequence
gtgagttgggactaggggttgggtctgggtccagacccggcccagccatcacacacctgccctccctcag

SEQ ID NO: 40614 - DNA, 108 bp, Artificial Sequence
  casX intron sequence
gtacgatggcacctccggcaaagagagccaggagaggtaagggtgtgttagtaaagtggggggaggggaaagatttaataacttaactaagtatgtgtttttttatag

SEQ ID NO: 40615 - DNA, 69 bp, Artificial Sequence
  casX intron sequence
gtgagctgcgcgcgcgcggcggggggcgggcgcccggaccccgctgaggctgcgcccctgtccccgcag

SEQ ID NO: 40616 - DNA, 206 bp, Artificial Sequence
  casX intron sequence
gttcgagcttttggagtacgtcgtctttaggttggggggaggggttttatgcgatggagtttccccacactgagtgggtggagactgaagttaggccagcttggcacttgatgtaattctccttggaatttgccctttttgagtttggatcttggttcattctcaagcctcagacagtggttcaaagtttttttcttccatttcag

SEQ ID NO: 40617 - DNA, 70 bp, Artificial Sequence
  casX intron sequence
gtgtgtgctgggcagggttgggggctgggggccagggcatgccaggctctgattgccaccccctttttag

SEQ ID NO: 40618 - DNA, 68 bp, Artificial Sequence
  casX intron sequence
gtaaggcaggctccctggggcggcaggtgggttgcatggagccaggctgaccctccatgtccccccag

SEQ ID NO: 40619 - DNA, 299 bp, Artificial Sequence
  casX intron sequence
gtttgtttccttttttaaaatacattgagtatgcttgccttttagatatagaaatatctgatgctgtctacttcactaaattttgattacatgatttgacagcaatattgaagagtctaacagccagcacgcaggttggtaagtactgtgggaacatcacagattttggctccatgccctaaagagaaattggctttcagattatttggattaaaaacaaagactttcttaagagatgtaaaattttcatgatgttttcttttttgctaaaactaaagaattattcttttacatttcag

SEQ ID NO: 40620 - DNA, 226 bp, Artificial Sequence
  casX intron sequence
gtcgctgcgacgctgccttcgccccgtgccccgctccgccgccgcctcgcgccgcccgccccggctctgactgaccgcgttactcccacaggtgagcgggcgggacggcccttctcctccgggctgtaattagctgagcaagaggtaagggtttaagggatggttggttggtggggtattaatgtttaattacctggagcacctgcctgaaatcactttttttcag

SEQ ID NO: 40621 - DNA, 71 bp, Artificial Sequence
  casX intron sequence
gtaagagtcagagctggcagggacgtacagtggccacgactggggtactgagctgcagttcacctggcaga

SEQ ID NO: 40622 - DNA, 69 bp, Artificial Sequence
  casX intron sequence
gtgggtagggtttgggggagagcgtgggctggggttcagggacaccctctcaccactgccctcccacag

SEQ ID NO: 40623 - DNA, 87 bp, Artificial Sequence
  casX intron sequence
gtaagtatacaattggatgtgctaaattgaacaaaataggttcttgtgctattttacttaggtttctctttttttccccacacatag

SEQ ID NO: 40624 - DNA, 84 bp, Artificial Sequence
  casX intron sequence
aggtaagggtttaagggatggttggttggtggggtattaatgtttaattacctggagcacctgcctgaaatcactttttttcag

SEQ ID NO: 40625 - DNA, 82 bp, Artificial Sequence
  casX intron sequence
gtaagggtttaagggatggttggttggtggggtattaatgtttaattacctgttttacaggcctgaaatcacttggttttag

SEQ ID NO: 40626 - DNA, 66 bp, Artificial Sequence
  casX intron sequence
gtgagccaggccgtgggagggcgcccccgagactgccacctgctcaccacccccctctgctcgtag

SEQ ID NO: 40627 - DNA, 65 bp, Artificial Sequence
  casX intron sequence
gtgagtgggcgccccggcggggtgggcagtgggcgggcccgagctgaccgcacccctccccacag

SEQ ID NO: 40628 - DNA, 66 bp, Artificial Sequence
  casX intron sequence
gtgcgtgagcggggactggcggggggtgcccccacgggaccgcgctgaacccggccccccacacag

SEQ ID NO: 40629 - DNA, 106 bp, Artificial Sequence
  casX intron sequence
gtaggatggcgcctcctgcaaaaagagcaagaggtaagggtagttttaagggggtggtgggcatacatataaaactaactgcaaataatttttttatatattacag

SEQ ID NO: 40630 - DNA, 69 bp, Artificial Sequence
  casX intron sequence
gtaggccctggcctgcagggactgtgggtgccccctgtccagtaccctcaccatgaccctgttgcccag

SEQ ID NO: 40631 - DNA, 68 bp, Artificial Sequence
  casX intron sequence
gtgagtcagggtggggctggccccctgcttcgtgcccatccgcgctctgactctctgcccacctgcag

SEQ ID NO: 40632 - DNA, 68 bp, Artificial Sequence
  casX intron sequence
gtactacggcctgggtagggaatggtgggtgggggcgggggaccccttaccaaggccaccctctgcag

SEQ ID NO: 40633 - DNA, 97 bp, Artificial Sequence
  casX intron sequence
gtaagtttagtctttttgtcttttatttcaggtcccggatccggtggtggtgcaaatcaaagaactgctcctcagtggatgttgcctttacttctag

SEQ ID NO: 40634 - DNA, 140 bp, Artificial Sequence
  casX intron sequence
gtaagtcactgactgtctatgcctgggaaagggtgggcaggagatggggcagtgcaggaaaagtggcactatgaaccctgcagccctaggaatgcatctagacaattgtactaaccttcttctctttcctctcctgacag

SEQ ID NO: 40635 - DNA, 133 bp, Artificial Sequence
  casX intron sequence
gtaagtatcaaggttacaagacaggtttaaggagaccaatagaaactgggcttgtcgagacagaggagactcttgcgtttctgataggcacctattggtcttactgacatccactttgcctttctctccacag

SEQ ID NO: 40636 - DNA, 190 bp, Artificial Sequence
  casX intron sequence
gtaaatttctagtttttctccttcattttcttggttaggacccttttctctttttatttttttgagctttgatctttctttaaactgatctattttttaattgattggttatggtgtaaatattacatagctttaactgataatctgattactttatttcgtgtgtctatgatgatgatgatagttacag

SEQ ID NO: 40637 - DNA, 271 bp, Artificial Sequence
  casX intron sequence
gtaagtaccgcctatagagtctataggcccacccccttggcttcttatgcatgctatactgtttttggcttggggtctatacacccccgcttcctcatgttataggtgatggtatagcttagcctataggtgtgggttattgaccattattgaccactccaacggtggagggcagtgtagtctgagcagtactcgttgctgccgcgcgcgccaccagacataatagctgacagactaacagactgttcctttccatgggtcttttctgcag

SEQ ID NO: 40638 - DNA, 96 bp, Artificial Sequence
  casX intron sequence
gtaagtaccgcctatagactctataggcacacccctttggctcttatgcatgctgacagactaacagactgttcctttcctgggtcttttctgcag

SEQ ID NO: 40639 - DNA, 110 bp, Artificial Sequence
  casX intron sequence
gtaagtaccgcctatagactctataggcacacccctttggctcttatgcatgaattaatacgactcactatagggagacagactgttcctttcctgggtcttttctgcag

SEQ ID NO: 40640 - DNA, 270 bp, Artificial Sequence
  casX intron sequence
gtaagtaccgcctatagactctataggcacacccctttggctcttatgcatgctatactgtttttggcttggggcctatacacccccgcttccttatgctataggtgatggtatagcttagcctataggtgtgggttattgaccattattgaccactccaacggtggagggcagtgtagtctgagcagtactcgttgctgccgcgcgcgccaccagacataatagctgacagactaacagactgttcctttccatgggtcttttctgcag

SEQ ID NO: 40641 - DNA, 116 bp, Artificial Sequence
  casX intron sequence
gtaagtactttgctacatccatactccatccttcccatcccttattcctttgaacctttcagttcgagctttcccacttcatcgcagcttgactaacagctaccccgcttgagcag

SEQ ID NO: 40642 - DNA, 67 bp, Artificial Sequence
  casX intron sequence
gtaggttcaaccactgatgcctaggcacaccgaaacgactaaccctaattcttatcctttacttcag

SEQ ID NO: 40643 - DNA, 66 bp, Artificial Sequence
  casX intron sequence
gtaaatataaaatttttaagtgtataatgtgttaaactactgattctaattgtttgtgtattttag

SEQ ID NO: 40644 - DNA, 130 bp, Artificial Sequence; identical to SEQ ID NO: 40557
  5' ITR

SEQ ID NO: 40645 - DNA, 584 bp, Artificial Sequence; identical to SEQ ID NO: 40370
  Enhancer + core promoter

SEQ ID NO: 40646 - DNA, 204 bp, Artificial Sequence; identical to SEQ ID NO: 40400
  Enhancer + core promoter

SEQ ID NO: 40647 - DNA, 414 bp, Artificial Sequence; identical to SEQ ID NO: 40436
  Enhancer + core promoter

SEQ ID NO: 40648 - DNA, 314 bp, Artificial Sequence; identical to SEQ ID NO: 40437
  Enhancer + core promoter

SEQ ID NO: 40649 - DNA, 324 bp, Artificial Sequence; identical to SEQ ID NO: 40438
  Enhancer + core promoter

SEQ ID NO: 40650 - DNA, 304 bp, Artificial Sequence; identical to SEQ ID NO: 40440
  Enhancer + core promoter

SEQ ID NO: 40651 - DNA, 364 bp, Artificial Sequence
  Enhancer + core promoter
gccggggtaccgagctggggggcgggagctgtcccggggacaggcctgggtgaggctgccgggacgcagggcccggctggggctacggccgaggccacacctggggctgtctcgggctgtccaccctgggggcggtgggctgccatcccccaatctgtcagtgatgcggttttggcagtacatcaatgggcgtggatagcggtttgactcacggggatttccaagtctccaccccattgacgtcaatgggagtttgttttggcaccaaaatcaacgggactttccaaaatgtcgtaacaactccgccccattgacgcaaatgggcggtaggcgtgtacggtgggaggtctatataagcagagct

SEQ ID NO: 40652 - DNA, 274 bp, Artificial Sequence; identical to SEQ ID NO: 40441
  Enhancer + core promoter

SEQ ID NO: 40653 - DNA, 354 bp, Artificial Sequence; identical to SEQ ID NO: 40442
  Enhancer + core promoter

SEQ ID NO: 40654 - DNA, 584 bp, Artificial Sequence; identical to SEQ ID NO: 40370
  Protein promoter

SEQ ID NO: 40655 - DNA, 400 bp, Artificial Sequence; identical to SEQ ID NO: 40371
  Protein promoter

SEQ ID NO: 40656 - DNA, 234 bp, Artificial Sequence; identical to SEQ ID NO: 40372
  Protein promoter

SEQ ID NO: 40657 - DNA, 335 bp, Artificial Sequence; identical to SEQ ID NO: 40373
  Protein promoter

SEQ ID NO: 40658 - DNA, 100 bp, Artificial Sequence; identical to SEQ ID NO: 40374
  Protein promoter

SEQ ID NO: 40659 - DNA, 52 bp, Artificial Sequence; identical to SEQ ID NO: 40375
  Protein promoter

SEQ ID NO: 40660 - DNA, 39 bp, Artificial Sequence; identical to SEQ ID NO: 40376
  Protein promoter

SEQ ID NO: 40661 - DNA, 146 bp, Artificial Sequence; identical to SEQ ID NO: 40377
  Protein promoter

SEQ ID NO: 40662 - DNA, 63 bp, Artificial Sequence; identical to SEQ ID NO: 40378
  Protein promoter

SEQ ID NO: 40663 - DNA, 114 bp, Artificial Sequence; identical to SEQ ID NO: 40379
  Protein promoter

SEQ ID NO: 40664 - DNA, 703 bp, Artificial Sequence; identical to SEQ ID NO: 40380
  Protein promoter

SEQ ID NO: 40665 - DNA, 81 bp, Artificial Sequence; identical to SEQ ID NO: 40381
  Protein promoter

SEQ ID NO: 40666 - DNA, 81 bp, Artificial Sequence; identical to SEQ ID NO: 40382
  Protein promoter

SEQ ID NO: 40667 - DNA, 81 bp, Artificial Sequence; identical to SEQ ID NO: 40383
  Protein promoter

SEQ ID NO: 40668 - DNA, 229 bp, Artificial Sequence; identical to SEQ ID NO: 40384
  Protein promoter

SEQ ID NO: 40669 - DNA, 68 bp, Artificial Sequence; identical to SEQ ID NO: 40385
  Protein promoter

SEQ ID NO: 40670 - DNA, 65 bp, Artificial Sequence; identical to SEQ ID NO: 40386
  Protein promoter

SEQ ID NO: 40671 - DNA, 39 bp, Artificial Sequence; identical to SEQ ID NO: 40376
  Protein promoter

SEQ ID NO: 40672 - DNA, 81 bp, Artificial Sequence; identical to SEQ ID NO: 40388
  Protein promoter

SEQ ID NO: 40673 - DNA, 107 bp, Artificial Sequence; identical to SEQ ID NO: 40389
  Protein promoter

SEQ ID NO: 40674 - DNA, 227 bp, Artificial Sequence; identical to SEQ ID NO: 40390
  Protein promoter

SEQ ID NO: 40675 - DNA, 448 bp, Artificial Sequence; identical to SEQ ID NO: 40391
  Protein promoter

SEQ ID NO: 40676 - DNA, 330 bp, Artificial Sequence; identical to SEQ ID NO: 40392
  Protein promoter

SEQ ID NO: 40677 - DNA, 511 bp, Artificial Sequence; identical to SEQ ID NO: 40393
  Protein promoter

SEQ ID NO: 40678 - DNA, 164 bp, Artificial Sequence; identical to SEQ ID NO: 40394
  Protein promoter

SEQ ID NO: 40679 - DNA, 326 bp, Artificial Sequence; identical to SEQ ID NO: 40395
  Protein promoter

SEQ ID NO: 40680 - DNA, 325 bp, Artificial Sequence; identical to SEQ ID NO: 40396
  Protein promoter

SEQ ID NO: 40681 - DNA, 243 bp, Artificial Sequence; identical to SEQ ID NO: 40397
  Protein promoter

SEQ ID NO: 40682 - DNA, 493 bp, Artificial Sequence; identical to SEQ ID NO: 40398
  Protein promoter

SEQ ID NO: 40683 - DNA, 565 bp, Artificial Sequence; identical to SEQ ID NO: 40399
  Protein promoter

SEQ ID NO: 40684 - DNA, 204 bp, Artificial Sequence; identical to SEQ ID NO: 40400
  Protein promoter

SEQ ID NO: 40685 - protein, 11 aa, Artificial Sequence
  5' NLS aa sequence
MAPKKKRKVSR

SEQ ID NO: 40686 - protein, 41 aa, Artificial Sequence
  5' NLS aa sequence
MAPKKKRKVGGSPKKKRKVGGSPKKKRKVGGSPKKKRKVSR

SEQ ID NO: 40687 - protein, 11 aa, Artificial Sequence
  5' NLS aa sequence
PAAKRVKLDSR

SEQ ID NO: 40688 - protein, 23 aa, Artificial Sequence
  5' NLS aa sequence
PAAKRVKLDGGSPAAKRVKLDSR

SEQ ID NO: 40689 - protein, 47 aa, Artificial Sequence; identical to SEQ ID NO: 40448
  5' NLS aa sequence

SEQ ID NO: 40690 - protein, 71 aa, Artificial Sequence; identical to SEQ ID NO: 40449
  5' NLS aa sequence

SEQ ID NO: 40691 - protein, 18 aa, Artificial Sequence
  5' NLS aa sequence
KRPAATKKAGQAKKKKSR

SEQ ID NO: 40692 - protein, 37 aa, Artificial Sequence; identical to SEQ ID NO: 40451
  5' NLS aa sequence

SEQ ID NO: 40693 - protein, 21 aa, Artificial Sequence
  5' NLS aa sequence
PAAKRVKLDGGSPKKKRKVSR

SEQ ID NO: 40694 - protein, 21 aa, Artificial Sequence
  5' NLS aa sequence
PAAKKKKLDGGSPKKKRKVSR

SEQ ID NO: 40695 - protein, 11 aa, Artificial Sequence
  5' NLS aa sequence
PAAKKKKLDSR

SEQ ID NO: 40696 - protein, 35 aa, Artificial Sequence; identical to SEQ ID NO: 40455
  5' NLS aa sequence

SEQ ID NO: 40697 - protein, 47 aa, Artificial Sequence; identical to SEQ ID NO: 40456
  5' NLS aa sequence

SEQ ID NO: 40698 - protein, 13 aa, Artificial Sequence
  5' NLS aa sequence
PAKRARRGYKCSR

SEQ ID NO: 40699 - protein, 26 aa, Artificial Sequence
  5' NLS aa sequence
PAKRARRGYKCGSPAKRARRGYKCSR

SEQ ID NO: 40700 - protein, 9 aa, Artificial Sequence
  5' NLS aa sequence
PRRKREESR

SEQ ID NO: 40701 - protein, 9 aa, Artificial Sequence
  5' NLS aa sequence
PYRGRKESR

SEQ ID NO: 40702 - protein, 10 aa, Artificial Sequence
  5' NLS aa sequence
PLRKRPRRSR

SEQ ID NO: 40703 - protein, 20 aa, Artificial Sequence
  5' NLS aa sequence
PLRKRPRRGSPLRKRPRRSR

SEQ ID NO: 40704 - protein, 32 aa, Artificial Sequence
  5' NLS aa sequence
PAAKRVKLDGGKRTADGSEFESPKKKRKVGGS

SEQ ID NO: 40705 - protein, 34 aa, Artificial Sequence
  5' NLS aa sequence
PAAKRVKLDGGKRTADGSEFESPKKKRKVPPPPG

SEQ ID NO: 40706 - protein, 39 aa, Artificial Sequence
  5' NLS aa sequence
PAAKRVKLDGGKRTADGSEFESPKKKRKVGIHGVPAAPG

SEQ ID NO: 40707 - protein, 39 aa, Artificial Sequence
  5' NLS aa sequence
PAAKRVKLDGGKRTADGSEFESPKKKRKVGGGSGGGSPG

SEQ ID NO: 40708 - protein, 40 aa, Artificial Sequence
  5' NLS aa sequence
PAAKRVKLDGGKRTADGSEFESPKKKRKVPGGGSGGGSPG

SEQ ID NO: 40709 - protein, 48 aa, Artificial Sequence
  5' NLS aa sequence
PAAKRVKLDGGKRTADGSEFESPKKKRKVAEAAAKEAAAKEAAAKAPG

SEQ ID NO: 40710 - protein, 31 aa, Artificial Sequence; identical to SEQ ID NO: 40197
  5' NLS aa sequence

SEQ ID NO: 40711 - protein, 22 aa, Artificial Sequence
  5' NLS aa sequence
PAAKRVKLDGGSPKKKRKVGGS

SEQ ID NO: 40712 - protein, 21 aa, Artificial Sequence
  5' NLS aa sequence
PAAKRVKLDPPPPKKKRKVPG

SEQ ID NO: 40713 - protein, 11 aa, Artificial Sequence
  5' NLS aa sequence
PAAKRVKLDPG

SEQ ID NO: 40714 - protein, 21 aa, Artificial Sequence
  5' NLS aa sequence
PAAKRVKLDGGGSGGGSGGGS

SEQ ID NO: 40715 - protein, 12 aa, Artificial Sequence
  5' NLS aa sequence
PAAKRVKLDPPP

SEQ ID NO: 40716 - protein, 24 aa, Artificial Sequence
  5' NLS aa sequence
PAAKRVKLDGGGSGGGSGGGSPPP

SEQ ID NO: 40717 - protein, 10 aa, Artificial Sequence
  5' NLS aa sequence
PKKKRKVPPP

SEQ ID NO: 40718 - protein, 10 aa, Artificial Sequence
  5' NLS aa sequence
PKKKRKVGGS

SEQ ID NO: 40719 - protein, 9 aa, Artificial Sequence
  3' NLS aa sequence
GSPKKKRKV

SEQ ID NO: 40720 - protein, 39 aa, Artificial Sequence; identical to SEQ ID NO: 40462
  3' NLS aa sequence

SEQ ID NO: 40721 - protein, 59 aa, Artificial Sequence; identical to SEQ ID NO: 40463
  3' NLS aa sequence

SEQ ID NO: 40722 - protein, 11 aa, Artificial Sequence
  3' NLS aa sequence
GSPAAKRVKLD

SEQ ID NO: 40723 - protein, 23 aa, Artificial Sequence
  3' NLS aa sequence
GSPAAKRVKLDGGSPAAKRVKLD

SEQ ID NO: 40724 - protein, 47 aa, Artificial Sequence; identical to SEQ ID NO: 40466
  3' NLS aa sequence

SEQ ID NO: 40725 - protein, 71 aa, Artificial Sequence; identical to SEQ ID NO: 40467
  3' NLS aa sequence

SEQ ID NO: 40726 - protein, 18 aa, Artificial Sequence
  3' NLS aa sequence
GSKRPAATKKAGQAKKKK

SEQ ID NO: 40727 - protein, 35 aa, Artificial Sequence; identical to SEQ ID NO: 40469
  3' NLS aa sequence

SEQ ID NO: 40728 - protein, 41 aa, Artificial Sequence; identical to SEQ ID NO: 40470
  3' NLS aa sequence

SEQ ID NO: 40729 - protein, 15 aa, Artificial Sequence
  3' NLS aa sequence
GSKLGPRKATGRWGS

SEQ ID NO: 40730 - protein, 19 aa, Artificial Sequence
  3' NLS aa sequence
GSKRKGSPERGERKRHWGS

SEQ ID NO: 40731 - protein, 31 aa, Artificial Sequence; identical to SEQ ID NO: 40473
  3' NLS aa sequence

SEQ ID NO: 40732 - protein, 30 aa, Artificial Sequence; identical to SEQ ID NO: 40474
  3' NLS aa sequence

SEQ ID NO: 40733 - protein, 36 aa, Artificial Sequence; identical to SEQ ID NO: 40475
  3' NLS aa sequence

SEQ ID NO: 40734 - protein, 45 aa, Artificial Sequence; identical to SEQ ID NO: 40476
  3' NLS aa sequence

SEQ ID NO: 40735 - protein, 40 aa, Artificial Sequence; identical to SEQ ID NO: 40477
  3' NLS aa sequence

SEQ ID NO: 40736 - protein, 28 aa, Artificial Sequence
  3' NLS aa sequence
GPAEAAAKEAAAKEAAAKAPAAKRVKLD

SEQ ID NO: 40737 - protein, 23 aa, Artificial Sequence
  3' NLS aa sequence
GPGGGSGGGSGGGSPAAKRVKLD

SEQ ID NO: 40738 - protein, 21 aa, Artificial Sequence
  3' NLS aa sequence
GPPKKKRKVPPPPAAKRVKLD

SEQ ID NO: 40739 - protein, 11 aa, Artificial Sequence
  3' NLS aa sequence
GPPAAKRVKLD

SEQ ID NO: 40740 - protein, 44 aa, Artificial Sequence; identical to SEQ ID NO: 40485
  3' NLS aa sequence

SEQ ID NO: 40741 - protein, 26 aa, Artificial Sequence
  3' NLS aa sequence
TGGGPGGGAAAGSGSPKKKRKVGSGS

SEQ ID NO: 40742 - protein, 13 aa, Artificial Sequence
  3' NLS aa sequence
PPPPKKKRKVPPP

SEQ ID NO: 40743 - protein, 13 aa, Artificial Sequence
  3' NLS aa sequence
GGSPKKKRKVPPP

SEQ ID NO: 40744 - protein, 10 aa, Artificial Sequence
  3' NLS aa sequence
PPPPKKKRKV

SEQ ID NO: 40745 - protein, 10 aa, Artificial Sequence
  3' NLS aa sequence
GGSPKKKRKV

SEQ ID NO: 40746 - protein, 19 aa, Artificial Sequence
  3' NLS aa sequence
GGSPKKKRKVGGSGGSGGS

SEQ ID NO: 40747 - protein, 20 aa, Artificial Sequence
  3' NLS aa sequence
GGSPKKKRKVGGSPKKKRKV

SEQ ID NO: 40748 - protein, 26 aa, Artificial Sequence
  3' NLS aa sequence
GGSGGSGGSPKKKRKVGGSPKKKRKV

SEQ ID NO: 40749 - protein, 24 aa, Artificial Sequence
  3' NLS aa sequence
PPPGGGSGGGSGGGSPAAKRVKLD

SEQ ID NO: 40750 - protein, 12 aa, Artificial Sequence
  3' NLS aa sequence
PPPPAAKRVKLD

SEQ ID NO: 40751 - protein, 24 aa, Artificial Sequence
  3' NLS aa sequence
PPPGGGSGGGSGGGSPAAKRVKLD

SEQ ID NO: 40752 - DNA, 592 bp, Artificial Sequence; identical to SEQ ID NO: 40431
  PTRE

SEQ ID NO: 40753 - DNA, 593 bp, Artificial Sequence; identical to SEQ ID NO: 40432
  PTRE

SEQ ID NO: 40754 - DNA, 247 bp, Artificial Sequence; identical to SEQ ID NO: 40433
  PTRE

SEQ ID NO: 40755 - DNA, 208 bp, Artificial Sequence; identical to SEQ ID NO: 40421
  Poly A signal

SEQ ID NO: 40756 - DNA, 623 bp, Artificial Sequence; identical to SEQ ID NO: 40422
  Poly A signal

SEQ ID NO: 40757 - DNA, 477 bp, Artificial Sequence; identical to SEQ ID NO: 40423
  Poly A signal

SEQ ID NO: 40758 - DNA, 49 bp, Artificial Sequence; identical to SEQ ID NO: 40424
  Poly A signal

SEQ ID NO: 40759 - DNA, 49 bp, Artificial Sequence; identical to SEQ ID NO: 40425
  Poly A signal

SEQ ID NO: 40760 - DNA, 122 bp, Artificial Sequence; identical to SEQ ID NO: 40426
  Poly A signal

SEQ ID NO: 40761 - DNA, 82 bp, Artificial Sequence; identical to SEQ ID NO: 40427
  Poly A signal

SEQ ID NO: 40762 - DNA, 395 bp, Artificial Sequence; identical to SEQ ID NO: 40428
  Poly A signal

SEQ ID NO: 40763 - DNA, 56 bp, Artificial Sequence; identical to SEQ ID NO: 40429
  Poly A signal

SEQ ID NO: 40764 - DNA, 181 bp, Artificial Sequence; identical to SEQ ID NO: 40430
  Poly A signal

SEQ ID NO: 40765 - DNA, 241 bp, Artificial Sequence; identical to SEQ ID NO: 40401
  RNA promoter

SEQ ID NO: 40766 - DNA, 215 bp, Artificial Sequence; identical to SEQ ID NO: 40402
  RNA promoter

SEQ ID NO: 40767 - DNA, 244 bp, Artificial Sequence; identical to SEQ ID NO: 40403
  RNA promoter

SEQ ID NO: 40768 - DNA, 103 bp, Artificial Sequence; identical to SEQ ID NO: 40404
  RNA promoter

SEQ ID NO: 40769 - DNA, 38 bp, Artificial Sequence; identical to SEQ ID NO: 40405
  RNA promoter

SEQ ID NO: 40770 - DNA, 67 bp, Artificial Sequence; identical to SEQ ID NO: 40406
  RNA promoter

SEQ ID NO: 40771 - DNA, 79 bp, Artificial Sequence; identical to SEQ ID NO: 40407
  RNA promoter

SEQ ID NO: 40772 - DNA, 111 bp, Artificial Sequence; identical to SEQ ID NO: 40408
  RNA promoter

SEQ ID NO: 40773 - DNA, 127 bp, Artificial Sequence; identical to SEQ ID NO: 40409
  RNA promoter

SEQ ID NO: 40774 - DNA, 123 bp, Artificial Sequence; identical to SEQ ID NO: 40410
  RNA promoter

SEQ ID NO: 40775 - DNA, 143 bp, Artificial Sequence; identical to SEQ ID NO: 40411
  RNA promoter

SEQ ID NO: 40776 - DNA, 131 bp, Artificial Sequence; identical to SEQ ID NO: 40412
  RNA promoter

SEQ ID NO: 40777 - DNA, 159 bp, Artificial Sequence; identical to SEQ ID NO: 40413
  RNA promoter

SEQ ID NO: 40778 - DNA, 103 bp, Artificial Sequence; identical to SEQ ID NO: 40414
  RNA promoter

SEQ ID NO: 40779 - DNA, 111 bp, Artificial Sequence; identical to SEQ ID NO: 40415
  RNA promoter

SEQ ID NO: 40780 - DNA, 127 bp, Artificial Sequence; identical to SEQ ID NO: 40416
  RNA promoter

SEQ ID NO: 40781 - DNA, 103 bp, Artificial Sequence; identical to SEQ ID NO: 40417
  RNA promoter

SEQ ID NO: 40782 - DNA, 131 bp, Artificial Sequence; identical to SEQ ID NO: 40418
  RNA promoter

SEQ ID NO: 40783 - DNA, 159 bp, Artificial Sequence; identical to SEQ ID NO: 40419
  RNA promoter

SEQ ID NO: 40784 - DNA, 128 bp, Artificial Sequence; identical to SEQ ID NO: 40420
  RNA promoter

SEQ ID NO: 40785 - DNA, 141 bp, Artificial Sequence; identical to SEQ ID NO: 40576
  3' ITR

SEQ ID NO: 40786 - RNA, 4 nt, Artificial Sequence
  3' ITR
aaag

SEQ ID NO: 40787 - RNA, 8 nt, Artificial Sequence
  3' ITR
uuuuuaaa

SEQ ID NO: 40788 - RNA, 4 nt, Artificial Sequence
  3' ITR
gaaa

SEQ ID NO: 40789 - RNA, 6 nt, Artificial Sequence
  tracr cRNA linker
gagaaa

SEQ ID NO: 40790 - protein, 84 aa, Artificial Sequence; identical to SEQ ID NO: 39967
  chloroplant transit peptide

SEQ ID NO: 40791 - protein, 57 aa, Artificial Sequence; identical to SEQ ID NO: 39980
  chloroplant transit peptide

SEQ ID NO: 40792 - protein, 85 aa, Artificial Sequence; identical to SEQ ID NO: 39968
  chloroplant transit peptide

SEQ ID NO: 40793 - protein, 76 aa, Artificial Sequence; identical to SEQ ID NO: 39969
  chloroplant transit peptide

SEQ ID NO: 40794 - protein, 76 aa, Artificial Sequence; identical to SEQ ID NO: 39970
  chloroplant transit peptide

SEQ ID NO: 40795 - protein, 72 aa, Artificial Sequence; identical to SEQ ID NO: 39971
  chloroplant transit peptide

SEQ ID NO: 40796 - protein, 69 aa, Artificial Sequence; identical to SEQ ID NO: 39972
  chloroplant transit peptide

SEQ ID NO: 40797 - protein, 77 aa, Artificial Sequence; identical to SEQ ID NO: 39973
  chloroplant transit peptide

SEQ ID NO: 40798 - protein, 122 aa, Artificial Sequence
  chloroplant transit peptide
MASSVLSSAAVATRSNVAQANMVAPFTGLKSAASFPVSRKQNLDITSIASNGGRVQCMESLAATSVFAPSRVAVPAARALVRAGTVVPTRRTSSTSGTSGVKCSAAVTPQASPVISRSAAAA

SEQ ID NO: 40799 - protein, 72 aa, Artificial Sequence; identical to SEQ ID NO: 39976
  chloroplant transit peptide

SEQ ID NO: 40800 - DNA, 20 bp, Artificial Sequence
  tdTomato target sequence
ctgcattctagttgtggttt

SEQ ID NO: 40801 - DNA, 29 bp, Artificial Sequence
  CMV primer
catctacgtattagtcatcgctattacca

SEQ ID NO: 40802 - DNA, 21 bp, Artificial Sequence
  CMV primer
gaaatccccgtgagtcaaacc

SEQ ID NO: 40803 - DNA, 17 bp, Artificial Sequence
  CMV probe
tcaatgggcgtggatag

SEQ ID NO: 40804 - DNA, 21 bp, Artificial Sequence
  AAV2 ITR primer
ggaacccctagtgatggagtt

SEQ ID NO: 40805 - DNA, 16 bp, Artificial Sequence
  AAV2 ITR primer
cggcctcagtgagcga

SEQ ID NO: 40806 - DNA, 21 bp, Artificial Sequence
  AAV2 ITR probe
cactccctctctgcgcgctcg

SEQ ID NO: 40807 - DNA, 20 bp, Artificial Sequence
  Spacer sequence
tatagcatacattatacgaa

SEQ ID NO: 40808 - protein, 979 aa, Artificial Sequence
  dCasX variant
QEIKRINKIRRRLVKDSNTKKAGKTRGPMKTLLVRVMTPDLRERLENLRKKPENIPQPISNTSRANLNKLLTDYTEMKKAILHVYWEEFQKDPVGLMSRVAQPASKKIDQNKLKPEMDEKGNLTTAGFACSQCGQPLFVYKLEQVSEKGKAYTNYFGRCNVAEHEKLILLAQLKPEKDSDEAVTYSLGKFGQRALDFYSIHVTKESTHPVKPLAQIAGNRYASYPVGKALSDACMGTIASFLSKYQDIIIEHQKVVKGNQKRLESLRELAGKENLEYPSVTLPPQPHTKEGVDAYNEVIARVRMWVNLNLWQKLKLSRDDAKPLLRLKGFPSFPLVERQANEVDWWDMVCNVKKLINEKKEDGKVFWQNLAGYKRQEALRPYLSSEEDRKKGKKFARYQLGDLLLHLEKKHGEDWGKVYDEAWERIDKKVEGLSKHIKLEEERRSEDAQSKAALTDWLRAKASFVIEGLKEADKDEFCRCELKLQKWYGDLRGKPFAIEAENSILDISGFSKQYNCAFIWQKDGVKKLNLYLIINYFKGGKLRFKKIKPEAFEANRFYTVINKKSGEIVPMEVNFNFDDPNLIILPLAFGKRQGREFIWNDLLSLETGSLKLANGRVIEKTLYNRRTRQDEPALFVALTFERREVLDSSNIKPMNLIGVARGENIPAVIALTDPEGCPLSRFKDSLGNPTHILRIGESYKEKQRTIQAKKEVEQRRAGGYSRKYASKAKNLADDMVRNTARDLLYYAVTQDAMLIFANLSRGFGRQGKRTFMAERQYTRMEDWLTAKLAYEGLPSKTYLSKTLAQYTSKTCSNCGFTITSADYDRVLEKLKKTATGWMTTINGKELKVEGQITYYNRYKRQNVVKDLSVELDRLSEESVNNDISSWTKGRSGEALSLLKKRFSHRPVQEKFVCLNCGFETHAAEQAALNIARSWLFLRSQEYKKYQTNKTTGNTDKRAFVETWQSFYRKKLKEVWKPAV

SEQ ID NO: 40809 - protein, 977 aa, Artificial Sequence
  dCasX variant
QEIKRINKIRRRLVKDSNTKKAGKTGPMKTLLVRVMTPDLRERLENLRKKPENIPQPISNTSRANLNKLLTDYTEMKKAILHVYWEEFQKDPVGLMSRVAQPASKKIDQNKLKPEMDEKGNLTTAGFACSQCGQPLFVYKLEQVSEKGKAYTNYFGRCNVAEHEKLILLAQLKPEKDSDEAVTYSLGKFGQRALDFYSIHVTKESTHPVKPLAQIAGNRYASGPVGKALSDACMGTIASFLSKYQDIIIEHQKVVKGNQKRLESLRELAGKENLEYPSVTLPPQPHTKEGVDAYNEVIARVRMWVNLNLWQKLKLSRDDAKPLLRLKGFPSFPLVERQANEVDWWDMVCNVKKLINEKKEDGKVFWQNLAGYKRQEALRPYLSSEEDRKKGKKFARYQLGDLLLHLEKKHGEDWGKVYDEAWERIDKKVEGLSKHIKLEEERRSEDAQSKAALTDWLRAKASFVIEGLKEADKDEFCRCELKLQKWYGDLRGKPFAIEAENSILDISGFSKQYNCAFIWQKDGVKKLNLYLIINYFKGGKLRFKKIKPEAFEANRFYTVINKKSGEIVPMEVNFNFDDPNLIILPLAFGKRQGREFIWNDLLSLETGSLKLANGRVIEKTLYNRRTRQDEPALFVALTFERREVLDSSNIKPMNLIGVARGENIPAVIALTDPEGCPLSRFKDSLGNPTHILRIGESYKEKQRTIQAKKEVEQRRAGGYSRKYASKAKNLADDMVRNTARDLLYYAVTQDAMLIFANLSRGFGRQGKRTFMAERQYTRMEDWLTAKLAYEGLSKTYLSKTLAQYTSKTCSNCGFTITSADYDRVLEKLKKTATGWMTTINGKELKVEGQITYYNRYKRQNVVKDLSVELDRLSEESVNNDISSWTKGRSGEALSLLKKRFSHRPVQEKFVCLNCGFETHAAEQAALNIARSWLFLRSQEYKKYQTNKTTGNTDKRAFVETWQSFYRKKLKEVWKPAV

SEQ ID NO: 40810 - protein, 979 aa, Artificial Sequence
  dCasX variant
QEIKRINKIRRRLVKDSNTKKAGKTRGPMKTLLVRVMTPDLRERLENLRKKPENIPQPISNTSRANLNKLLTDYTEMKKAILHVYWEEFQKDPVGLMSRVAQPASKKIDQNKLKPEMDEKGNLTTAGFACSQCGQPLFVYKLEQVSEKGKAYTNYFGRCNVAEHEKLILLAQLKPEKDSDEAVTYSLGKFGQRALDFYSIHVTKESTHPVKPLAQIAGNRYASGPVGKALSDACMGTIASFLSKYQDIIIEHQKVVKGNQKRLESLRELAGKENLEYPSVTLPPQPHTKEGVDAYNEVIARVRMWVNLNLWQKLKLSRDDAKPLLRLKGFPSFPLVERQANEVDWWDMVCNVKKLINEKKEDGKVFWQNLAGYKRQEALRPYLSSEEDRKKGKKFARYQLGDLLLHLEKKHGEDWGKVYDEAWERIDKKVEGLSKHIKLEEERRSEDAQSKAALTDWLRAKASFVIEGLKEADKDEFCRCELKLQKWYGDLRGKPFAIEAENSILDISGFSKQYNCAFIWQKDGVKKLNLYLIINYFKGGKLRFKKIKPEAFEANRFYTVINKKSGEIVPMEVNFNFDDPNLIILPLAFGKRQGREFIWNDLLSLETGSLKLANGRVIEKTLYNRRTRQDEPALFVALTFERREVLDSSNIKPMNLIGVARGENIPAVIALTDPEGCPLSRFKDSLGNPTHILRIGESYKEKQRTIQAKKEVEQRRAGGYSRKYASKAKNLADDMVRNTARDLLYYAVTQDAMLIFANLSRGFGRQGKRTFMAERQYTRMEDWLTAKLAYEGLPSKTYLSKTLAQYTSKTCSNCGFTITSADYDRVLEKLKKTATGWMTTINGKELKVEGQITYYNRYKRQNVVKDLSVELDRLSEESVNNDISSWTKGRSGEALSLLKKRFSHRPVQEKFVCLNCGFETHAAEQAALNIARSWLFLRSQEYKKYQTNKTTGNTDKRAFVETWQSFYRKKLKEVWKPAV

SEQ ID NO: 40811 - protein, 978 aa, Artificial Sequence
  dCasX variant
QEIKRINKIRRRLVKDSNTKKAGKTGPMKTLLVRVMTPDLRERLENLRKKPENIPQPISNTSRANLNKLLTDYTEMKKAILHVYWEEFQKDPVGLMSRVAQPASKKIDQNKLKPEMDEKGNLTTAGFACSQCGQPLFVYKLEQVSEKGKAYTNYFGRCNVAEHEKLILLAQLKPEKDSDEAVTYSLGKFGQRALDFYSIHVTKESTHPVKPLAQIAGNRYASNPVGKALSDACMGTIASFLSKYQDIIIEHQKVVKGNQKRLESLRELAGKENLEYPSVTLPPQPHTKEGVDAYNEVIARVRMWVNLNLWQKLKLSRDDAKPLLRLKGFPSFPLVERQANEVDWWDMVCNVKKLINEKKEDGKVFWQNLAGYKRQEALRPYLSSEEDRKKGKKFARYQLGDLLLHLEKKHGEDWGKVYDEAWERIDKKVEGLSKHIKLEEERRSEDAQSKAALTDWLRAKASFVIEGLKEADKDEFCRCELKLQKWYGDLRGKPFAIEAENSILDISGFSKQYNCAFIWQKDGVKKLNLYLIINYFKGGKLRFKKIKPEAFEANRFYTVINKKSGEIVPMEVNFNFDDPNLIILPLAFGKRQGREFIWNDLLSLETGSLKLANGRVIEKTLYNRRTRQDEPALFVALTFERREVLDSSNIKPMNLIGVARGENIPAVIALTDPEGCPLSRFKDSLGNPTHILRIGESYKEKQRTIQAKKEVEQRRAGGYSRKYASKAKNLADDMVRNTARDLLYYAVTQDAMLIFANLSRGFGRQGKRTFMAERQYTRMEDWLTAKLAYEGLPSKTYLSKTLAQYTSKTCSNCGFTITSADYDRVLEKLKKTATGWMTTINGKELKVEGQITYYNRYKRQNVVKDLSVELDRLSEESVNNDISSWTKGRSGEALSLLKKRFSHRPVQEKFVCLNCGFETHAAEQAALNIARSWLFLRSQEYKKYQTNKTTGNTDKRAFVETWQSFYRKKLKEVWKPAV

SEQ ID NO: 40812 - protein, 979 aa, Artificial Sequence
  dCasX variant
QEIKRINKIRRRLVKDSNTKKAGKTGPMKTLLVRVMTPDLRERLENLRKKPENIPQPISNTSRANLNKLLTDYTEMKKAILHVYWEEFQKDPVGLMSRVAQPASKKIDQNKLKPEMDEKGNLTTAGFACSQCGQPLFVYKLEQVSEKGKAYTNYFGRCNVAEHEKLILLAQLKPEKDSDEAVTYSLGKFGQRALDFYSIHVTKESTHPVKPLAQIAGNRYASGPVGKALSDACMGTIASFLSKYQDIIIEHQKVVKGNQKRLESLRELAGKENLEYPSVTLPPQPHTKEGVDAYNEVIARVRMWVNLNLWQKLKLSRDDAKPLLRLKGFPSFPLVERQANEVDWWDMVCNVKKLINEKKEDGKVFWQNLAGYKRQEALRPYLSSEEDRKKGKKFARYQLGDLLLHLEKKHGEDWGKVYDEAWERIDKKVEGLSKHIKLEEERRSEDAQSKAALTDWLRAKASFVIEGLKEADKDEFCRCELKLQKWYGDLRGKPFAIEAENSILDISGFSKQYNCAFIWQKDGVKKLNLYLIINYFKGYGKLRFKKIKPEAFEANRFYTVINKKSGEIVPMEVNFNFDDPNLIILPLAFGKRQGREFIWNDLLSLETGSLKLANGRVIEKTLYNRRTRQDEPALFVALTFERREVLDSSNIKPMNLIGVARGENIPAVIALTDPEGCPLSRFKDSLGNPTHILRIGESYKEKQRTIQAKKEVEQRRAGGYSRKYASKAKNLADDMVRNTARDLLYYAVTQDAMLIFANLSRGFGRQGKRTFMAERQYTRMEDWLTAKLAYEGLPSKTYLSKTLAQYTSKTCSNCGFTITSADYDRVLEKLKKTATGWMTTINGKELKVEGQITYYNRYKRQNVVKDLSVELDRLSEESVNNDISSWTKGRSGEALSLLKKRFSHRPVQEKFVCLNCGFETHAAEQAALNIARSWLFLRSQEYKKYQTNKTTGNTDKRAFVETWQSFYRKKLKEVWKPAV

SEQ ID NO: 40813 - protein, 979 aa, Artificial Sequence
  dCasX variant
QEIKRINKIRRRLVKDSNTKKAGKTGPMKTLLVRVMTPDLRERLENLRKKPENIPQPISNTSRANLNKLLTDYTEMKKAILHVYWEEFQKDPVGLMSRVAQPASKKIDQNKLKPEMDEKGNLTTAGFACSQCGQPLFVYKLEQVSEKGKAYTNYFGRCNVAEHEKLILLAQLKPEKDSDEAVTYSLGKFGQRALDFYSIHVTKESTHPVKPLAQIAGNRYASGPVGKALSDACMGTIASFLSKYQDIIIEHQKVVKGNQKRLESLRELAGKENLEYPSVTLPPQPHTKEGVDAYNEVIARVRMWVNLNLWQKLKLSRDDAKPLLRLKGFPSFPLVERQANEVDWWDMVCNVKKLINEKKEDGKVFWQNLAGYKRQEALRPYLSSEEDRKKGKKFARYQLGDLLLHLEKKHGEDWGKVYDEAWERIDKKVEGLSKHIKLEEERRSEDAQSKAALTDWLRAKASFVIEGLKEADKDEFCRCELKLQKWYGDLRGKPFAIEAENSILDISGFSKQYNCAFIWQKDGVKKLNLYLIINYFKGWGKLRFKKIKPEAFEANRFYTVINKKSGEIVPMEVNFNFDDPNLIILPLAFGKRQGREFIWNDLLSLETGSLKLANGRVIEKTLYNRRTRQDEPALFVALTFERREVLDSSNIKPMNLIGVARGENIPAVIALTDPEGCPLSRFKDSLGNPTHILRIGESYKEKQRTIQAKKEVEQRRAGGYSRKYASKAKNLADDMVRNTARDLLYYAVTQDAMLIFANLSRGFGRQGKRTFMAERQYTRMEDWLTAKLAYEGLPSKTYLSKTLAQYTSKTCSNCGFTITSADYDRVLEKLKKTATGWMTTINGKELKVEGQITYYNRYKRQNVVKDLSVELDRLSEESVNNDISSWTKGRSGEALSLLKKRFSHRPVQEKFVCLNCGFETHAAEQAALNIARSWLFLRSQEYKKYQTNKTTGNTDKRAFVETWQSFYRKKLKEVWKPAV

SEQ ID NO: 40814 - protein, 978 aa, Artificial Sequence
  dCasX variant
QEIKRINKIRRRLVKDSNTKKAGKTGPMKTLLVRVMTPDLRERLENLRKKPENIPQPISNTSRANLNKLLTDYTEMKKAILHVYWEEFQKDPVGLMSRVAQPASKKIDQNKLKPEMDEKGNLTTAGFACSQCGQPLFVYKLEQVSEKGKAYTNYFGRCNVAEHEKLILLAQLKPEKDSDEAVTYSLGKFGQRALDFYSIHVTKESTHPVKPLAQIAGNRYASYPVGKALSDACMGTIASFLSKYQDIIIEHQKVVKGNQKRLESLRELAGKENLEYPSVTLPPQPHTKEGVDAYNEVIARVRMWVNLNLWQKLKLSRDDAKPLLRLKGFPSFPLVERQANEVDWWDMVCNVKKLINEKKEDGKVFWQNLAGYKRQEALRPYLSSEEDRKKGKKFARYQLGDLLLHLEKKHGEDWGKVYDEAWERIDKKVEGLSKHIKLEEERRSEDAQSKAALTDWLRAKASFVIEGLKEADKDEFCRCELKLQKWYGDLRGKPFAIEAENSILDISGFSKQYNCAFIWQKDGVKKLNLYLIINYFKGGKLRFKKIKPEAFEANRFYTVINKKSGEIVPMEVNFNFDDPNLIILPLAFGKRQGREFIWNDLLSLETGSLKLANGRVIEKTLYNRRTRQDEPALFVALTFERREVLDSSNIKPMNLIGVARGENIPAVIALTDPEGCPLSRFKDSLGNPTHILRIGESYKEKQRTIQAKKEVEQRRAGGYSRKYASKAKNLADDMVRNTARDLLYYAVTQDAMLIFANLSRGFGRQGKRTFMAERQYTRMEDWLTAKLAYEGLPSKTYLSKTLAQYTSKTCSNCGFTITSADYDRVLEKLKKTATGWMTTINGKELKVEGQITYYNRYKRQNVVKDLSVELDRLSEESVNNDISSWTKGRSGEALSLLKKRFSHRPVQEKFVCLNCGFETHAAEQAALNIARSWLFLRSQEYKKYQTNKTTGNTDKRAFVETWQSFYRKKLKEVWKPAV

SEQ ID NO: 40815 - protein, 978 aa, Artificial Sequence
  dCasX variant
QEIKRINKIRRRLVKDSNTKKAGKTRGPMKTLLVRVMTPDLRERLENLRKKPENIPQPISNTSRANLNKLLTDYTEMKKAILHVYWEEFQKDPVGLMSRVAQPASKKIDQNKLKPEMDEKGNLTTAGFACSQCGQPLFVYKLEQVSEKGKAYTNYFGRCNVAEHEKLILLAQLKPEKDSDEAVTYSLGKFGQRALDFYSIHVTKESTHPVKPLAQIAGNRYASGPVGKALSDACMGTIASFLSKYQDIIIEHQKVVKGNQKRLESLRELAGKENLEYPSVTLPPQPHTKEGVDAYNEVIARVRMWVNLNLWQKLKLSRDDAKPLLRLKGFPSFPLVERQANEVDWWDMVCNVKKLINEKKEDGKVFWQNLAGYKRQEALRPYLSSEEDRKKGKKFARYQLGDLLLHLEKKHGEDWGKVYDEAWERIDKKVEGLSKHIKLEEERRSEDAQSKAALTDWLRAKASFVIEGLKEADKDEFCRCELKLQKWYGDLRGKPFAIEAENSILDISGFSKQYNCAFIWQKDGVKKLNLYLIINYFKGGKLRFKKIKPEAFEANRFYTVINKKSGEIVPMEVNFNFDDPNLIILPLAFGKRQGREFIWNDLLSLETGSLKLANGRVIEKTLYNRRTRQDEPALFVALTFERREVLDSSNIKPMNLIGVARGENIPAVIALTDPEGCPLSRFKDSLGNPTHILRIGESYKEKQRTIQAKKEVEQRRAGGYSRKYASKAKNLADDMVRNTARDLLYYAVTQDAMLIFANLSRGFGRQGKRTFMAERQYTRMEDWLTAKLAYEGLSKTYLSKTLAQYTSKTCSNCGFTITSADYDRVLEKLKKTATGWMTTINGKELKVEGQITYYNRYKRQNVVKDLSVELDRLSEESVNNDISSWTKGRSGEALSLLKKRFSHRPVQEKFVCLNCGFETHAAEQAALNIARSWLFLRSQEYKKYQTNKTTGNTDKRAFVETWQSFYRKKLKEVWKPAV

SEQ ID NO: 40816 - protein, 978 aa, Artificial Sequence
  dCasX variant
QEIKRINKIRRRLVKDSNTKKAGKTGPMKTLLVRVMTPDLRERLENLRKKPENIPQPISNTSRANLNKLLTDYTEMKKAILHVYWEEFQKDPVGLMSRVAQPASKKIDQNKLKPEMDEKGNLTTAGFACSQCGQPLFVYKLEQVSEKGKAYTNYFGRCNVAEHEKLILLAQLKPEKDSDEAVTYSLGKFGQRALDFYSIHVTKESTHPVKPLAQIAGNRYASGPVGKALSDACMGTIASFLSKYQDIIIEHQKVVKGNQKRLESLRELAGKENLEYPSVTLPPQPHTKEGVDAYNEVIARVRMWVNLNLWQKLKLSRDDAKPLLRLKGFPSFPLVERQANEVDWWDMVCNVKKLINEKKEDGKVFWQNLAGYKRQEALRPYLSSEEDRKKGKKFARYQLGDLLLHLEKKHGEDWGKVYDEAWERIDKKVEGLSKHIKLEEERRSEDAQSKAALTDWLRAKASFVIEGLKEADKDEFCRCELKLQKWYGDLRGKPFAIEAENSILDISGFSKQYNCAFIWQKDGVKKLNLYLIINYFKGGKLRFKKIKPEAFEANRFYTVINKKSGEIVPMEVNFNFDDPNLIILPLAFGKRQGREFIWNDLLSLETGSLKLANGRVIEKTLYNRRTRQDEPALFVALTFERREVLDSSNIKPMNLIGVARGENIPAVIALTDPEGCPLSRFKDSLGNPTHILRIGESYKEKQRTIQAKKEVEQRRAGGYSRKYASKAKNLADDMVRNTARDLLYYAVTQDAMLIFANLSRGFGRQGKRTFMAERQYTRMEDWLTAKLAYEGLPSKTYLSKTLAQYTSKTCSNCGFTITSADYDRVLEKLKKTATGWMTTINGKELKVEGQITYYNRYKRQNVVKDLSVELDRLSEESVNNDISSWTKGRSGEALSLLKKRFSHRPVQEKFVCLNCGFETHAAEQAALNIARSWLFLRSQEYKKYQTNKTTGNTDKRAFVETWQSFYRKKLKEVWKPAV

SEQ ID NO: 40817 - protein, 978 aa, Artificial Sequence
  dCasX variant
QEIKRINKIRRRLVKDSNTKKAGKTGPMKTLLVRVMTPDLRERLENLRKKPENIPQPISNTSRANLNKLLTDYTEMKKAILHVYWEEFQKDPVGLMSRVAQPASKKIDQNKLKPEMDEKGNLTTAGFACSQCGQPLFVYKLEQVSEKGKAYTNYFGRCNVAEHEKLILLAQLKPEKDSDEAVTYSLGKFGQRALDFYSIHVTKESTHPVKPLAQIAGNRYASGPVGKALSDACMGTIASFLSKYQDIIIEHQKVVKGNQKRLESLRELAGKENLEYPSVTLPPQPHTKEGVDAYNEVIARVRMWVNLNLWQKLKLSRDDAKPLLRLKGFPSFPLVERQANEVDWWDMVCNVKKLINEKKEDGKVFWQNLAGYKRQEALRPYLSSEEDRKKGKKFARYQLGDLLLHLEKKHGEDWGKVYDEAWERIDKKVEGLSKHIKLEEERRSEDAQSKAALTDWLRAKASFVIEGLKEADKDEFCRCELKLQKWYGDLRGKPFAIEAENSILDISGFSKQYNCAFIWQKDGVKKLNLYLIINYFKGGKLRFKKIKPEAFEANRFYTVINKKSGEIVPMEVNFNFDDPNLIILPLAFGKRQGREFIWNDLLSLETGSLKLANGRVIEKTLYNRRTRQDEPALFVALTFERREVLDSSNIKPMNLIGVARGENIPAVIALTDPEGCPLSRFKDSLGNPTHILRIGESYKEKQRTIQAKKEVEQRRAGGYSRKYASKAKNLADDMVRNTARDLLYYAVTQDAMLIFANLSRGFGRQGKRTFMAERQYTRMEDWLTAKLAYEGLSKTYLSKTLAQYTSKTCSNCGFTIHTSADYDRVLEKLKKTATGWMTTINGKELKVEGQITYYNRYKRQNVVKDLSVELDRLSEESVNNDISSWTKGRSGEALSLLKKRFSHRPVQEKFVCLNCGFETHAAEQAALNIARSWLFLRSQEYKKYQTNKTTGNTDKRAFVETWQSFYRKKLKEVWKPAV

SEQ ID NO: 40818 - protein, 977 aa, Artificial Sequence
  dCasX variant
QEIKRINKIRRRLVKDSNTKKAGKTGPMKTLLVRVMTPDLRERLENLRKKPENIPQPISNTSRANLNKLLTDYTEMKKAILHVYWEEFQKDPVGLMSRVAQPASKKIDQNKLKPEMDEKGNLTTAGFACSQCGQPLFVYKLEQVSEKGKAYTNYFGRCNVAEHEKLILLAQLKPEKDSDEAVTYSLGKFGQRALDFYSIHVTKESTHPVKPLAQIAGNRYASGPVGKALSDACMGTIASFLSKYQDIIIEHQKVVKGNQKRLESLRELAGKENLEYPSVTLPPQPHTKEGVDAYNEVIARVRMWVNHNLWQKLKLSRDDAKPLLRLKGFPSFPLVERQANEVDWWDMVCNVKKLINEKKEDGKVFWQNLAGYKRQEALRPYLSSEEDRKKGKKFARYQLGDLLLHLEKKHGEDWGKVYDEAWERIDKKVEGLSKHIKLEEERRSEDAQSKAALTDWLRAKASFVIEGLKEADKDEFCRCELKLQKWYGDLRGKPFAIEAENSILDISGFSKQYNCAFIWQKDGVKKLNLYLIINYFKGGKLRFKKIKPEAFEANRFYTVINKKSGEIVPMEVNFNFDDPNLIILPLAFGKRQGREFIWNDLLSLETGSLKLANGRVIEKTLYNRRTRQDEPALFVALTFERREVLDSSNIKPMNLIGVARGENIPAVIALTDPEGCPLSRFKDSLGNPTHILRIGESYKEKQRTIQAKKEVEQRRAGGYSRKYASKAKNLADDMVRNTARDLLYYAVTQDAMLIFANLSRGFGRQGKRTFMAERQYTRMEDWLTAKLAYEGLSKTYLSKTLAQYTSKTCSNCGFTITSADYDRVLEKLKKTATGWMTTINGKELKVEGQITYYNRYKRQNVVKDLSVELDRLSEESVNNDISSWTKGRSGEALSLLKKRFSHRPVQEKFVCLNCGFETHAAEQAALNIARSWLFLRSQEYKKYQTNKTTGNTDKRAFVETWQSFYRKKLKEVWKPAV

SEQ ID NO: 40819 - protein, 978 aa, Artificial Sequence
  dCasX variant
QEIKRINKIRRRLVKDSNTKKAGKTGPMKTLLVRVMTPDLRERLENLRKKPENIPQPISNTSRANLNKLLTDYTEMKKAILHVYWEEFQKDPVGLMSRVAQPASKKIDQNKLKPEMDEKGNLTTAGFACSQCGQPLFVYKLEQVSEKGKAYTNYFGRCNVAEHEKLILLAQLKPEKDSDEAVTYSLGKFGQRALDFYSIHVTKESTHPVKPLAQIAGNRYASGAPVGKALSDACMGTIASFLSKYQDIIIEHQKVVKGNQKRLESLRELAGKENLEYPSVTLPPQPHTKEGVDAYNEVIARVRMWVNLNLWQKLKLSRDDAKPLLRLKGFPSFPLVERQANEVDWWDMVCNVKKLINEKKEDGKVFWQNLAGYKRQEALRPYLSSEEDRKKGKKFARYQLGDLLLHLEKKHGEDWGKVYDEAWERIDKKVEGLSKHIKLEEERRSEDAQSKAALTDWLRAKASFVIEGLKEADKDEFCRCELKLQKWYGDLRGKPFAIEAENSILDISGFSKQYNCAFIWQKDGVKKLNLYLIINYFKGGKLRFKKIKPEAFEANRFYTVINKKSGEIVPMEVNFNFDDPNLIILPLAFGKRQGREFIWNDLLSLETGSLKLANGRVIEKTLYNRRTRQDEPALFVALTFERREVLDSSNIKPMNLIGVARGENIPAVIALTDPEGCPLSRFKDSLGNPTHILRIGESYKEKQRTIQAKKEVEQRRAGGYSRKYASKAKNLADDMVRNTARDLLYYAVTQDAMLIFANLSRGFGRQGKRTFMAERQYTRMEDWLTAKLAYEGLSKTYLSKTLAQYTSKTCSNCGFTITSADYDRVLEKLKKTATGWMTTINGKELKVEGQITYYNRYKRQNVVKDLSVELDRLSEESVNNDISSWTKGRSGEALSLLKKRFSHRPVQEKFVCLNCGFETHAAEQAALNIARSWLFLRSQEYKKYQTNKTTGNTDKRAFVETWQSFYRKKLKEVWKPAV

SEQ ID NO: 40820 - protein, 979 aa, Artificial Sequence
  dCasX variant
RQEIKRINKIRRRLVKDSNTKKAGKTGPMKTLLVRVMTPDLRERLENLRKKPENIPQPISNTSRANLNKLLTDYTEMKKAILHVYWEEFQKDPVGLMSRVAQPASKKIDQNKLKPEMDEKGNLTTAGFACSQCGQPLFVYKLEQVSEKGKAYTNYFGRCNVAEHEKLILLAQLKPEKDSDEAVTYSLGKFGQRALDFYSIHVTKESTHPVKPLAQIAGNRYASGAPVGKALSDACMGTIASFLSKYQDIIIEHQKVVKGNQKRLESLRELAGKENLEYPSVTLPPQPHTKEGVDAYNEVIARVRMWVNLNLWQKLKLSRDDAKPLLRLKGFPSFPLVERQANEVDWWDMVCNVKKLINEKKEDGKVFWQNLAGYKRQEALRPYLSSEEDRKKGKKFARYQLGDLLLHLEKKHGEDWGKVYDEAWERIDKKVEGLSKHIKLEEERRSEDAQSKAALTDWLRAKASFVIEGLKEADKDEFCRCELKLQKWYGDLRGKPFAIEAENSILDISGFSKQYNCAFIWQKDGVKKLNLYLIINYFKGGKLRFKKIKPEAFEANRFYTVINKKSGEIVPMEVNFNFDDPNLIILPLAFGKRQGREFIWNDLLSLETGSLKLANGRVIEKTLYNRRTRQDEPALFVALTFERREVLDSSNIKPMNLIGVARGENIPAVIALTDPEGCPLSRFKDSLGNPTHILRIGESYKEKQRTIQAKKEVEQRRAGGYSRKYASKAKNLADDMVRNTARDLLYYAVTQDAMLIFANLSRGFGRQGKRTFMAERQYTRMEDWLTAKLAYEGLSKTYLSKTLAQYTSKTCSNCGFTITSADYDRVLEKLKKTATGWMTTINGKELKVEGQITYYNRYKRQNVVKDLSVELDRLSEESVNNDISSWTKGRSGEALSLLKKRFSHRPVQEKFVCLNCGFETHAAEQAALNIARSWLFLRSQEYKKYQTNKTTGNTDKRAFVETWQSFYRKKLKEVWKPAV

SEQ ID NO: 40821 - protein, 978 aa, Artificial Sequence
  dCasX variant
QEIKRINKIRRRLVKDSNTKKAGKTGPMKTLLVRVMTPDLRERLENLRKKPENIPQPISNTSRANLNKLLTDYTEMKKAILHVYWEEFQKDPVGLMSRVAQPASKKIDQNKLKPEMDEKGNLTTAGFACSQCGQPLFVYKLEQVSEKGKAYTNYFGRCNVAEHEKLILLAQLKPEKDSDEAVTYSLGKFGQRALDFYSIHVTKESTHPVKPLAQIAGNRYASGPVGKALSDACMGTIASFLSKYQDIIIEHQKVVKGNQKRLESLRELAGKENLEYPSVTLPPQPHTKEGVDAYNEVIARVRMWVNLNLWQKLKLSRDDAKPLLRLKGFPSFPLVERQANEVDWWDMVCNVKKLINEKKEDGKVFWQNLAGYKRQEALRPYLSSEEDRKKGKKFARYQLGDLLLHLEKKHGEDWGKVYDEAWERIDKKVEGLSKHIKLEEERRSEDAQSKAALTDWLRAKASFVIEGLKEADKDEFCRCELKLQKWYGDLRGKPFAIEAENSILDISGFSKQYNCAFIWQKDGVKKLNLYLIINYFKGGKLRFKKIKPEAFEANRFYTVINKKSGEIVPMEVNFNFDDPNLIILPLAFGKRQGREFIWNDLLSLETGSLKLANGRVIEKTLYNRRTRQDEPALFVALTFERREVLDSSNIKPMNLIGVARGENIPAVIALTDPEGCPLSRFKDSLGNPTHIQLRIGESYKEKQRTIQAKKEVEQRRAGGYSRKYASKAKNLADDMVRNTARDLLYYAVTQDAMLIFANLSRGFGRQGKRTFMAERQYTRMEDWLTAKLAYEGLSKTYLSKTLAQYTSKTCSNCGFTITSADYDRVLEKLKKTATGWMTTINGKELKVEGQITYYNRYKRQNVVKDLSVELDRLSEESVNNDISSWTKGRSGEALSLLKKRFSHRPVQEKFVCLNCGFETHAAEQAALNIARSWLFLRSQEYKKYQTNKTTGNTDKRAFVETWQSFYRKKLKEVWKPAV

SEQ ID NO: 40822 - protein, 977 aa, Artificial Sequence
  dCasX variant
QEIKRINKIRRRLVKDSNTKKAGKTGPMKTLLVRVMTPDLRERLENLRKKPENIPQPISNTSRANLNKLLTDYTEMKKAILHVYWEEFQKDPVGLMSRVAQPASKKIDQNKLKPEMDEKGNLTTAGFACSQCGQPLFVYKLEQVSEKGKAYTNYFGRCNVAEHEKLILLAQLKPEKDSDEAVTYSLGKFGQRALDFYSIHVTKESTHPVKPLAQIAGNRYASGPVGKALSDACMGTIASFLSKYQDIIIEHQKVVKGNQKRLESLRELAGKENLEYPSVTLPPQPHTKEGVDAYNEVIARVRMWVNLNLWQKLKLSRDDAKPLLRLKGFPSFPLVERQANEVDWWDMVCNVKKLINEKKEDGKVFWQNLAGYKRQEALRPYLSSEEDRKKGKKFARYQLGDLLLHLEKKHGEDWGKVYDEAWERIDKKVEGLSKHIKLEEERRSEDAQSKAALTDWLRAKASFVIEGLKEADKDEFCRCELKLQKWYGDLRGKPFAIEAENSILDISGFSKQYNCAFIWQKDGVKKLNLYLIINYFKGGKLRFKKIKPEAFEANRFYTVINKKSGEIVPMEVNFNFDDPNLIILPLAFGKRQGREFIWNDLLSLETGSLKLANGRVIEKTLYNRRTRQDEPALFVALTFERREVLDSSNIKPMNLIGVARGENIPAVIALTDPEGCPLSRFKDSLGNPTHILRIGESYKEKQRTTQAKKEVEQRRAGGYSRKYASKAKNLADDMVRNTARDLLYYAVTQDAMLIFANLSRGFGRQGKRTFMAERQYTRMEDWLTAKLAYEGLSKTYLSKTLAQYTSKTCSNCGFTITSADYDRVLEKLKKTATGWMTTINGKELKVEGQITYYNRYKRQNVVKDLSVELDRLSEESVNNDISSWTKGRSGEALSLLKKRFSHRPVQEKFVCLNCGFETHAAEQAALNIARSWLFLRSQEYKKYQTNKTTGNTDKRAFVETWQSFYRKKLKEVWKPAV

SEQ ID NO: 40823 - protein, 977 aa, Artificial Sequence
  dCasX variant
QEIKRINKIRRRLVKDSNTKKAGKTGPMKTLLVRVMTPDLRERLENLRKKPENIPQPISNTSRANLNKLLTDYTEMKKAILHVYWEEFQKDPVGLMSRVAQPASKKIDQNKLKPEMDEKGNLTTAGFACSQCGQPLFVYKLEQVSEKGKAYTNYFGRCNVAEHEKLILLAQLKPEKDSDEAVTYSLGKFGQRALDFYSIHVTKESTHPVKPLAQIAGNRYASGPVGKALSDACMGTIASFLSKYQDIIIEHQKVVKGNQKRLESLRELAGKENLEYPSVTLPPQPHTKEGVDAYNEVIARVRMWVNLNLWQKLKLSRDDAKPLLRLKGFPSFPLVERQANEVDWWDMVCNVKKLINEKKEDGKVFWQNLAGYKRQEALRPYLSSEEDRKKGKKFARYQLGDLLLHLEKKHGEDWGKVYDEAWERIDKKVEGLSKHIKLEEERRSEDAQSKAALTDWLRAKASFVIEGLKEADKDEFCRCELKLQKWYGDLRGKPFAIEAENSILDISGFSKQYNCAFIWQKDGVKKLNLYLIINYFKGGKLRFKKIKPEAFEANRFYTVINKKSGEIVPMEVNFNFDDPNLIILPLAFGKRQGREFIWNDLLSLETGSLKLANGRVIEKTLYNRRTRQDEPALFVALTFERREVLDSSNIKPMNLIGVARGENIPAVIALTDPEGCPLSRFKRSLGNPTHILRIGESYKEKQRTIQAKKEVEQRRAGGYSRKYASKAKNLADDMVRNTARDLLYYAVTQDAMLIFANLSRGFGRQGKRTFMAERQYTRMEDWLTAKLAYEGLSKTYLSKTLAQYTSKTCSNCGFTITSADYDRVLEKLKKTATGWMTTINGKELKVEGQITYYNRYKRQNVVKDLSVELDRLSEESVNNDISSWTKGRSGEALSLLKKRFSHRPVQEKFVCLNCGFETHAAEQAALNIARSWLFLRSQEYKKYQTNKTTGNTDKRAFVETWQSFYRKKLKEVWKPAV

SEQ ID NO: 40824 - protein, 977 aa, Artificial Sequence
  dCasX variant
QEIKRINKIRRRLVKDSNTKKAGKTYPMKTLLVRVMTPDLRERLENLRKKPENIPQPISNTSRANLNKLLTDYTEMKKAILHVYWEEFQKDPVGLMSRVAQPASKKIDQNKLKPEMDEKGNLTTAGFACSQCGQPLFVYKLEQVSEKGKAYTNYFGRCNVAEHEKLILLAQLKPEKDSDEAVTYSLGKFGQRALDFYSIHVTKESTHPVKPLAQIAGNRYASGPVGKALSDACMGTIASFLSKYQDIIIEHQKVVKGNQKRLESLRELAGKENLEYPSVTLPPQPHTKEGVDAYNEVIARVRMWVNLNLWQKLKLSRDDAKPLLRLKGFPSFPLVERQANEVDWWDMVCNVKKLINEKKEDGKVFWQNLAGYKRQEALRPYLSSEEDRKKGKKFARYQLGDLLLHLEKKHGEDWGKVYDEAWERIDKKVEGLSKHIKLEEERRSEDAQSKAALTDWLRAKASFVIEGLKEADKDEFCRCELKLQKWYGDLRGKPFAIEAENSILDISGFSKQYNCAFIWQKDGVKKLNLYLIINYFKGGKLRFKKIKPEAFEANRFYTVINKKSGEIVPMEVNFNFDDPNLIILPLAFGKRQGREFIWNDLLSLETGSLKLANGRVIEKTLYNRRTRQDEPALFVALTFERREVLDSSNIKPMNLIGVARGENIPAVIALTDPEGCPLSRFKDSLGNPTHILRIGESYKEKQRTIQAKKEVEQRRAGGYSRKYASKAKNLADDMVRNTARDLLYYAVTQDAMLIFANLSRGFGRQGKRTFMAERQYTRMEDWLTAKLAYEGLSKTYLSKTLAQYTSKTCSNCGFTITSADYDRVLEKLKKTATGWMTTINGKELKVEGQITYYNRYKRQNVVKDLSVELDRLSEESVNNDISSWTKGRSGEALSLLKKRFSHRPVQEKFVCLNCGFETHAAEQAALNIARSWLFLRSQEYKKYQTNKTTGNTDKRAFVETWQSFYRKKLKEVWKPAV

SEQ ID NO: 40825 - protein, 977 aa, Artificial Sequence
  dCasX variant
QEIKRINKIRRRLVKDSNTKKAGKTGPMKTLLVRVMTPDLRERLENLRKKPENIPQPISNTSRANLNKLLTDYTEMKKAILHVYWEEFQKDPVGLMSRVAQPASKKIDQNKLKPEMDEKGNLTTAGFACSQCGQPLFVYKLEQVSEKGKAYTNYFGRCNVAEHEKLILLAQLKPEKDSDEAVTYSLGKFGQRALDFYSIHVTKESTHPVKPLAQIAGNRYASGPVGKALSDACMGTIASFLSKYQDIIIEHQKVVKGNQKRLESLRELAGKENLEYPSVTLPPQPHTKEGVDAYNEVIARVRMWVNLNLWQKLKLSRDDAKPLLRLKGFPSFPLVERQANEVDWWDMVCNVKKLINEKKEDGKVFWQNLAGYKRQEALRPYLSSEEDRKKGKKFARYQLGDLLLHLEKKHGEDWGKVYDEAWERIDKKVEGLSKHIKLEEERRSEDAQSKAALTDWLRAKASFVIEGLKEADKDEFCRCELKLQKWYGDLRGKPFAIEAENSILDISGFSKQYNCAFIWQKDGVKKLNLYLIINYFKGGKLRFKKIKPEAFEANRFYTVINKKSGEIVPMEVNFNFDDPNLIILPLAFGKRQGREFIWNDLLSLETGSLKLANGRVIEKTLYNRRTRQDEPALFVALTFERREVLDSSNIKPMNLIGVARGENIPAVIALTDPEGCPLSRFKDSLGNPTHILRIGESYKEKQRTIQAKKEVEQRRAGGYSRKYASKAKNLADDMVRNTARDLLYYAVTQDAMLIFANLSRGFGRQGKRTFMAERQYTRMEDWLTAKLAYEGLSKTYLSKTLAQYTSKTCSNCGFTIHSADYDRVLEKLKKTATGWMTTINGKELKVEGQITYYNRYKRQNVVKDLSVELDRLSEESVNNDISSWTKGRSGEALSLLKKRFSHRPVQEKFVCLNCGFETHAAEQAALNIARSWLFLRSQEYKKYQTNKTTGNTDKRAFVETWQSFYRKKLKEVWKPAV

SEQ ID NO: 40826 - protein, 977 aa, Artificial Sequence
  dCasX variant
QEIKRINKIRRRLVKDSNTKKAGKTGPMKTLLVRVMTPDLRERLENLRKKPENIPQPISNTSRANLNKLLTDYTEMKKAILHVYWEEFQKDPVGLMSRVAQPASKKIDQNKLKPEMDEKGNLTTAGFACSQCGQPLFVYKLEQVSEKGKAYTNYFGRCNVAEHEKLILLAQLKPEKDSDEAVTYSLGKFGQRALDFYSIHVTKESTHPVKPLAQIAGNRYASGPVGKALSDACMGTIASFLSKYQDIIIEHQKVVKGNQKRLESLRELAGKENLEYPSVTLPPQPHTKEGVDAYNEVIARVRMWVNLNLWQKLKLSRDDAKPLLRLKGFPSFPLVERQANEVDWWDMVCNVKKLINEKKEDGKVFWQNLAGYKRQEALRPYLSSEEDRKKGKKFARYQLGDLLLHLEKKHGEDWGKVYDEAWERIDKKVEGLSKHIKLEEERRSEDAQSKAALTDWLRAKASFVIEGLKEADKDEFCRCELKLQKWYGDLRGKPFAIEAENSILDISGFSKQYNCAFIWQKDGVKKLNLYLIINYFKGGKLRFKKIKPEAFEANRFYTVINKKSGEIVPMEVNFNFDDPNLIILPLAFGKRQGREFIWNDLLSLETGSLKLANGRVIEKTLYNRRTRQDEPALFVALTFERREVLDSSNIKPMNLIGVARGENIPAVIALTDPEGCPLSRFKDSLGNPTHILRIGESYKEKQRTIQAKKEVEQRRAGGYSRKYASKAKNLADDMVRNTARDLLYYAATQDAMLIFANLSRGFGRQGKRTFMAERQYTRMEDWLTAKLAYEGLSKTYLSKTLAQYTSKTCSNCGFTITSADYDRVLEKLKKTATGWMTTINGKELKVEGQITYYNRYKRQNVVKDLSVELDRLSEESVNNDISSWTKGRSGEALSLLKKRFSHRPVQEKFVCLNCGFETHAAEQAALNIARSWLFLRSQEYKKYQTNKTTGNTDKRAFVETWQSFYRKKLKEVWKPAV

SEQ ID NO: 40827 - protein, 977 aa, Artificial Sequence
  dCasX variant
QEIKRINKIRRRLVKDSNTKKAGKTGPMKTLLVRVMTPDLRERLENLRKKPENIPQPISNTSRANLNKLLTDYTEMKKAILHVYWEEFQKDPVGLMSRVAQPASKKIDQNKLKPEMDEKGNLTTAGFACSQCGQPLFVYKLEQVSEKGKAYTNYFGRCNVAEHEKLILLAQLKPEKDSDEAVTYSLGKFGQRALDFYSIHVTKESTHPVKPLAQIAGNRYASGPVGKALSDACMGTIASFLSKYQDIIIEHQKVVKGNQKRLESLRELAGKENLEYPSVTLPPQPHTKEGVDAYNEVIARVRMWVNLNLWQKLKLSRDDAKPLLRLKGFPSFPLVERQANEVDWWDMVCNVKKLINEKKEDGKVFWQNLAGYKRQEALRPYLSSEEDRKKGKKFARYQLGDLLLHLEKKHGEDWGKVYDEAWERIDKKVEGLSKHIKLEEERRSEDAQSKAALTDWLRAKASFVIEGLKEADKDEFCRCELKLQKWYGDLRGKPFAIEAENSILDISGFSKQYNCAFIWQKDGVKKLNLYLIINYFKGGKLRFKKIKPEAFEANRFYTVINKKSGEIVPMEVNFNFDDPNLIILPLAFGKRQGREFIWNDLLSLETGSLKLANGRVIEKTLYNRRTRQDEPALFVALTFERREVLDSSNIKPMNLIGVARGENIPAVIALTDPEGCPLSRFKDSLGNPTHILRIGESYKEKQRTIQAAKEVEQRRAGGYSRKYASKAKNLADDMVRNTARDLLYYAVTQDAMLIFANLSRGFGRQGKRTFMAERQYTRMEDWLTAKLAYEGLSKTYLSKTLAQYTSKTCSNCGFTITSADYDRVLEKLKKTATGWMTTINGKELKVEGQITYYNRYKRQNVVKDLSVELDRLSEESVNNDISSWTKGRSGEALSLLKKRFSHRPVQEKFVCLNCGFETHAAEQAALNIARSWLFLRSQEYKKYQTNKTTGNTDKRAFVETWQSFYRKKLKEVWKPAV

SEQ ID NO: 40828 - protein, 979 aa, Artificial Sequence
  CasX variant
QEIKRINKIRRRLVKDSNTKKAGKTGPMKTLLVRVMTPDLRERLENLRKKPENIPQPISNTSRANLNKLLTDYTEMKKAILHVYWEEFQKDPVGLMSRVAQPASKKIDQNKLKPEMDEKGNLTTAGFACSQCGQPLFVYKLEQVSEKGKAYTNYFGRCNVAEHEKLILLAQLKPEKDSDEAVTYSLGKFGQRALDFYSIHVTKESTHPVKPLAQIAGNRYASGPVGKALSDACMGTIASFLSKYQDIIIEHQKVVKGNQKRLESLRELAGKENLEYPSVTLPPQPHTKEGVDAYNEVIARVRMWVNLNLWQKLKLSRDDAKPLLRLKGFPSFPLVERQANEVDWWDMVCNVKKLINEKKEDGKVFWQNLAGYKRQEALRPYLSSEEDRKKGKKFARYQLGDLLLHLEKKHGEDWGKVYDEAWERIDKKVEGLSKHIKLEEERRSEDAQSKAALTDWLRAKASFVIEGLKEADKDEFCRCELKLQKWYGDLRGKPFAIEAENSILDISGFSKQYNCAFIWQKDGVKKLNLYLIINYFKGGKLRFKKIKPEAFEANRFYTVINKKSGEIVPMEVNFNFDDPNLIILPLAFGKRQGREFIWNDLLSLETGSLKLANGRVIEKTLYNARRTRQDEPALFVALTFERREVLDSSNIKPMNLIGVDRGENIPAVIALTDPEGCPLSRFKDSLGNPTHILRIGESYKEKQRTIQAKKEVEQRRAGGYSRKYASKAKNLADDMVRNTARDLLYYAVTQDAMLIFENLSRGFGRQGKRTFMAERQYTRMEDWLTAKLAYEGLPSKTYLSKTLAQYTSKTCSNCGFTITSADYDRVLEKLKKTATGWMTTINGKELKVEGQITYYNRYKRQNVVKDLSVELDRLSEESVNNDISSWTKGRSGEALSLLKKRFSHRPVQEKFVCLNCGFETHADEQAALNIARSWLFLRSQEYKKYQTNKTTGNTDKRAFVETWQSFYRKKLKEVWKPAV

SEQ ID NO: 40829 - protein, 978 aa, Artificial Sequence
  CasX variant
QEIKRINKIRRRLVKDSNTKKAGKTGPMKTLLVRVMTPDLRERLENLRKKPENIPQPISNTSRANLNKLLTDYTEMKKAILHVYWEEFQVDPVGLMSRVAQPASKKIDQNKLKPEMDEKGNLTTAGFACSQCGQPLFVYKLEQVSEKGKAYTNYFGRCNVAEHEKLILLAQLKPEKDSDEAVTYSLGKFGQRALDFYSIHVTKESTHPVKPLAQIAGNRYASGPVGKALSDACMGTIASFLSKYQDIIIEHQKVVKGNQKRLESLRELAGKENLEYPSVTLPPQPHTKEGVDAYNEVIARVRMWVNLNLWQKLKLSRDDAKPLLRLKGFPSFPLVERQANEVDWWDMVCNVKKLINEKKEDGKVFWQNLAGYKRQEALRPYLSSEEDRKKGKKFARYQLGDLLLHLEKKHGEDWGKVYDEAWERIDKKVEGLSKHIKLEEERRSEDAQSKAALTDWLRAKASFVIEGLKEADKDEFCRCELKLQKWYGDLRGKPFAIEAENSILDISGFSKQYNCAFIWQKDGVKKLNLYLIINYFKGGKLRFKKIKPEAFEANRFYTVINKKSGEIVPMEVNFNFDDPNLIILPLAFGKRQGREFIWNDLLSLETGSLKLANGRVIEKTLYNRRTRQDEPALFVALTFERREVLDSSNIKPMNLIGVDRGENIPAVIALTDPEGCPLSRFKDSLGNPTHILRIGESYKEKQRTIQAKKEVEQRRAGGYSRKYASKAKNLADDMVRNTARDLLYYAVTQDAMLIFENLSRGFGRQGKRTFMAERQYTRMEDWLTAKLAYEGLPSKTYLSKTLAQYTSKTCSNCGFTITSADYDRVLEKLKKTATGWMTTINGKELKVEGQITYYNRYKRQNVVKDLSVELDRLSEESVNNDISSWTKGRSGEALSLLKKRFSHRPVQEKFVCLNCGFETHADEQAALNIARSWLFLRSQEYKKYQTNKTTGNTDKRAFVETWQSFYRKKLKEVWKPAV

SEQ ID NO: 40830 - protein, 979 aa, Artificial Sequence
  CasX variant
QEIKRINKIRRRLVKDSNTKKAGKTGPMKTLLVRVMTPDLRERLENLRKKPENIPQPISNTSRANLNKLLTDYTEMKKAILHVYWEGEFQKDPVGLMSRVAQPASKKIDQNKLKPEMDEKGNLTTAGFACSQCGQPLFVYKLEQVSEKGKAYTNYFGRCNVAEHEKLILLAQLKPEKDSDEAVTYSLGKFGQRALDFYSIHVTKESTHPVKPLAQIAGNRYASGPVGKALSDACMGTIASFLSKYQDIIIEHQKVVKGNQKRLESLRELAGKENLEYPSVTLPPQPHTKEGVDAYNEVIARVRMWVNLNLWQKLKLSRDDAKPLLRLKGFPSFPLVERQANEVDWWDMVCNVKKLINEKKEDGKVFWQNLAGYKRQEALRPYLSSEEDRKKGKKFARYQLGDLLLHLEKKHGEDWGKVYDEAWERIDKKVEGLSKHIKLEEERRSEDAQSKAALTDWLRAKASFVIEGLKEADKDEFCRCELKLQKWYGDLRGKPFAIEAENSILDISGFSKQYNCAFIWQKDGVKKLNLYLIINYFKGGKLRFKKIKPEAFEANRFYTVINKKSGEIVPMEVNFNFDDPNLIILPLAFGKRQGREFIWNDLLSLETGSLKLANGRVIEKTLYNRRTRQDEPALFVALTFERREVLDSSNIKPMNLIGVDRGENIPAVIALTDPEGCPLSRFKDSLGNPTHILRIGESYKEKQRTIQAKKEVEQRRAGGYSRKYASKAKNLADDMVRNTARDLLYYAVTQDAMLIFENLSRGFGRQGKRTFMAERQYTRMEDWLTAKLAYEGLPSKTYLSKTLAQYTSKTCSNCGFTITSADYDRVLEKLKKTATGWMTTINGKELKVEGQITYYNRYKRQNVVKDLSVELDRLSEESVNNDISSWTKGRSGEALSLLKKRFSHRPVQEKFVCLNCGFETHADEQAALNIARSWLFLRSQEYKKYQTNKTTGNTDKRAFVETWQSFYRKKLKEVWKPAV

SEQ ID NO: 40831 - protein, 978 aa, Artificial Sequence
  CasX variant
QEIKRINKIRRRLVKDSNTKKAGKTGPMKTLLVRVMTPDLRERLENLRKKPENIPQPISNTSRANLNKLLTDYTEMKKAILHVYWEEFQKDPVGLMSRVAQPASKKIDQNKLKPEMDEKGNLTTAGFACSQCGQPLFVYKLEQVSEKGKAYTNYFGRCNVAEHEKLILLAQLKPEKDSDEAVTYSLGKFGQRALDFYSIHVTKESTHPVKPLAQIAGNRYASGPVGKALSDACMGTIASFLSKYQDIIIEHQKVVKGNQKRLEHLRELAGKENLEYPSVTLPPQPHTKEGVDAYNEVIARVRMWVNLNLWQKLKLSRDDAKPLLRLKGFPSFPLVERQANEVDWWDMVCNVKKLINEKKEDGKVFWQNLAGYKRQEALRPYLSSEEDRKKGKKFARYQLGDLLLHLEKKHGEDWGKVYDEAWERIDKKVEGLSKHIKLEEERRSEDAQSKAALTDWLRAKASFVIEGLKEADKDEFCRCELKLQKWYGDLRGKPFAIEAENSILDISGFSKQYNCAFIWQKDGVKKLNLYLIINYFKGGKLRFKKIKPEAFEANRFYTVINKKSGEIVPMEVNFNFDDPNLIILPLAFGKRQGREFIWNDLLSLETGSLKLANGRVIEKTLYNRRTRQDEPALFVALTFERREVLDSSNIKPMNLIGVDRGENIPAVIALTDPEGCPLSRFKDSLGNPTHILRIGESYKEKQRTIQAKKEVEQRRAGGYSRKYASKAKNLADDMVRNTARDLLYYAVTQDAMLIFENLSRGFGRQGKRTFMAERQYTRMEDWLTAKLAYEGLPSKTYLSKTLAQYTSKTCSNCGFTITSADYDRVLEKLKKTATGWMTTINGKELKVEGQITYYNRYKRQNVVKDLSVELDRLSEESVNNDISSWTKGRSGEALSLLKKRFSHRPVQEKFVCLNCGFETHADEQAALNIARSWLFLRSQEYKKYQTNKTTGNTDKRAFVETWQSFYRKKLKEVWKPAV

SEQ ID NO: 40832 - protein, 979 aa, Artificial Sequence
  CasX variant
QEIKRINKIRRRLVKDSNTKKAGKTGPMKTLLVRVMTPDLRERLENLRKKPENIPQPISNTSRANLNKLLTDYTEMKKAILHVYWEEFQKDPVGLMSRVAQPASKKIDQNKLKPEMDEKGNLTTAGFACSQCGQPLFVYKLEQVSEKGKAYTNYFGRCNVAEHEKLILLAQLKPEKDSDEAVTYSLGKFGQRALDFYSIHVTKESTHPVKPLAQICAGNRYASGPVGKALSDACMGTIASFLSKYQDIIIEHQKVVKGNQKRLESLRELAGKENLEYPSVTLPPQPHTKEGVDAYNEVIARVRMWVNLNLWQKLKLSRDDAKPLLRLKGFPSFPLVERQANEVDWWDMVCNVKKLINEKKEDGKVFWQNLAGYKRQEALRPYLSSEEDRKKGKKFARYQLGDLLLHLEKKHGEDWGKVYDEAWERIDKKVEGLSKHIKLEEERRSEDAQSKAALTDWLRAKASFVIEGLKEADKDEFCRCELKLQKWYGDLRGKPFAIEAENSILDISGFSKQYNCAFIWQKDGVKKLNLYLIINYFKGGKLRFKKIKPEAFEANRFYTVINKKSGEIVPMEVNFNFDDPNLIILPLAFGKRQGREFIWNDLLSLETGSLKLANGRVIEKTLYNRRTRQDEPALFVALTFERREVLDSSNIKPMNLIGVDRGENIPAVIALTDPEGCPLSRFKDSLGNPTHILRIGESYKEKQRTIQAKKEVEQRRAGGYSRKYASKAKNLADDMVRNTARDLLYYAVTQDAMLIFENLSRGFGRQGKRTFMAERQYTRMEDWLTAKLAYEGLPSKTYLSKTLAQYTSKTCSNCGFTITSADYDRVLEKLKKTATGWMTTINGKELKVEGQITYYNRYKRQNVVKDLSVELDRLSEESVNNDISSWTKGRSGEALSLLKKRFSHRPVQEKFVCLNCGFETHADEQAALNIARSWLFLRSQEYKKYQTNKTTGNTDKRAFVETWQSFYRKKLKEVWKPAV

SEQ ID NO: 40833 - protein, 976 aa, Artificial Sequence
  CasX variant
QEIKRINKIRRRLVKDSNTKKAGKTGPMKTLLVRVMTPDLRERLENLRKKPENIPQPISNTSRANLNKLLTDYTEMKKAILHVYWEEFQKDPVGLMSRVAQPASKKIDQNKLKPEMDEKGNLTTAGFACSQCGQPLFVYKLEQVSEKGKAYTNYFGRCNVAEHEKLILLAQLKPEKDSDEAVTYSLGKFGQRALDFYSIHVTKESTHPVKPLAQIAGNRYASGPVGKALSDACMGTIASFLSKYQDIIIEHQKVVKGNQKRLESLRELAGKENLEYPSVTLPPQPHTKEGVDAYNEVIARVRMWVNLNLWQKLKLSRDDAKPLLRLKGFPSFPLVERQANEVDWWVCNVKKLINEKKEDGKVFWQNLAGYKRQEALRPYLSSEEDRKKGKKFARYQLGDLLLHLEKKHGEDWGKVYDEAWERIDKKVEGLSKHIKLEEERRSEDAQSKAALTDWLRAKASFVIEGLKEADKDEFCRCELKLQKWYGDLRGKPFAIEAENSILDISGFSKQYNCAFIWQKDGVKKLNLYLIINYFKGGKLRFKKIKPEAFEANRFYTVINKKSGEIVPMEVNFNFDDPNLIILPLAFGKRQGREFIWNDLLSLETGSLKLANGRVIEKTLYNRRTRQDEPALFVALTFERREVLDSSNIKPMNLIGVDRGENIPAVIALTDPEGCPLSRFKDSLGNPTHILRIGESYKEKQRTIQAKKEVEQRRAGGYSRKYASKAKNLADDMVRNTARDLLYYAVTQDAMLIFENLSRGFGRQGKRTFMAERQYTRMEDWLTAKLAYEGLPSKTYLSKTLAQYTSKTCSNCGFTITSADYDRVLEKLKKTATGWMTTINGKELKVEGQITYYNRYKRQNVVKDLSVELDRLSEESVNNDISSWTKGRSGEALSLLKKRFSHRPVQEKFVCLNCGFETHADEQAALNIARSWLFLRSQEYKKYQTNKTTGNTDKRAFVETWQSFYRKKLKEVWKPAV

SEQ ID NO: 40834 - protein, 978 aa, Artificial Sequence
  CasX variant
QEIKRINKIRRRLVKDSNTKKAGKTGPMKTLLVRVMTPDLRERLENLRKKPENIPQPISNTSRANLNKLLTDYTEMKKAILHVYWEEFQKDPVGLMSRVAQPASKKIDQNKLKPEMDEKGNLTTAGFACSQCGQPLFVYKLEQVSEKGKAYTNYFGRCNVAEHEKLILLAQLKPEKDSDEAVTYSLGKFGQRALDFYSIHVTKESTHPVKPLAQIAGNRYASGPVGKALSDACMGTIASFLSKYQDIIIEHQKVVKGNQKRLESLRELAGKENLEYPSVTLPPQPHTKEGVDAYNEVIARVRMWVNLNLWQKLKLSRDDAKPLLRLKGFPSFPLVERQANEVDWWDMVCNVKKLINEKKEDGKVFWQNLAGYKRQEALRPYLSSEEDRKKGKKFARYQLGDLLLHLEKKHGEDWGKVYDEAWERIDKKVEGLSKHIKLEEERRSEDAQSKAALTDWLRAKASFVIEGLKEADKDEFCRCELKLQKWYGDLRGKPFAIEAENSILDISGFSKQYNCAFIWQKDGVKKLNLYLIINYFGGGKLRFKKIKPEAFEANRFYTVINKKSGEIVPMEVNFNFDDPNLIILPLAFGKRQGREFIWNDLLSLETGSLKLANGRVIEKTLYNRRTRQDEPALFVALTFERREVLDSSNIKPMNLIGVDRGENIPAVIALTDPEGCPLSRFKDSLGNPTHILRIGESYKEKQRTIQAKKEVEQRRAGGYSRKYASKAKNLADDMVRNTARDLLYYAVTQDAMLIFENLSRGFGRQGKRTFMAERQYTRMEDWLTAKLAYEGLPSKTYLSKTLAQYTSKTCSNCGFTITSADYDRVLEKLKKTATGWMTTINGKELKVEGQITYYNRYKRQNVVKDLSVELDRLSEESVNNDISSWTKGRSGEALSLLKKRFSHRPVQEKFVCLNCGFETHADEQAALNIARSWLFLRSQEYKKYQTNKTTGNTDKRAFVETWQSFYRKKLKEVWKPAV

SEQ ID NO: 40835 - protein, 979 aa, Artificial Sequence
  CasX variant
QEIKRINKIRRRLVKDSNTKKAGKTGPMKTLLVRVMTPDLRERLENLRKKPENIPQPISNTSRANLNKLLTDYTEMKKAILHVYWEEFQKDPVGLMSRVAQPASKKIDQNKLKPEMDEKGNLTTAGFACSQCGQPLFVYKLEQVSEKGKAYTNYFGRCNVAEHEKLILLAQLKPEKDSDEAVTYSLGKFGQRALDFYSIHVTKESTHPVKPLAQIAGNRYASGPVGKALSDACMGTIASFLSKYQDIIIEHQKVVKGNQKRLESLRELAGKENLEYPSVTLPPQPHTKEGVDAYNEVIARVRMWVNLNLWQKLKLSRDDAKPLLRLKGFPSFPLVERQANEVDWWDMVCNVKKLINEKKEDGKVFWQNLAGYKRQEALRPYLSSEEDRKKGKKFARYQLGDLLLHLEKKHGEDWGKLVYDEAWERIDKKVEGLSKHIKLEEERRSEDAQSKAALTDWLRAKASFVIEGLKEADKDEFCRCELKLQKWYGDLRGKPFAIEAENSILDISGFSKQYNCAFIWQKDGVKKLNLYLIINYFKGGKLRFKKIKPEAFEANRFYTVINKKSGEIVPMEVNFNFDDPNLIILPLAFGKRQGREFIWNDLLSLETGSLKLANGRVIEKTLYNRRTRQDEPALFVALTFERREVLDSSNIKPMNLIGVDRGENIPAVIALTDPEGCPLSRFKDSLGNPTHILRIGESYKEKQRTIQAKKEVEQRRAGGYSRKYASKAKNLADDMVRNTARDLLYYAVTQDAMLIFENLSRGFGRQGKRTFMAERQYTRMEDWLTAKLAYEGLPSKTYLSKTLAQYTSKTCSNCGFTITSADYDRVLEKLKKTATGWMTTINGKELKVEGQITYYNRYKRQNVVKDLSVELDRLSEESVNNDISSWTKGRSGEALSLLKKRFSHRPVQEKFVCLNCGFETHADEQAALNIARSWLFLRSQEYKKYQTNKTTGNTDKRAFVETWQSFYRKKLKEVWKPAV

SEQ ID NO: 40836 - protein, 979 aa, Artificial Sequence
  CasX variant
QEIKRINKIRRRLVKDSNTKKAGKTGPMKTLLVRVMTPDLRERLENLRKKPENIPQPISNTSRANLNKLLTDYTEMKKAILHVYWEEFQKDPVGLMSRVAQPASKKIDQNKLKPEMDEKGNLTTAGFACSQCGQPLFVYKLEQVSEKGKAYTNYFGRCNVAEHEKLILLAQLKPEKDSDEAVTYSLGKFGQRALDFYSIHVTKESTHPVKPLAQIAGNRYASGPVGKALSDACMGTIASFLSKYQDIIIEHQKVVKGNQKRLESLRELAGKENLEYPSVTLPPQPHTKEGVDAYNEVIARVRMWVNLNLWQKLKLSRDDAKPLLRLKGQFPSFPLVERQANEVDWWDMVCNVKKLINEKKEDGKVFWQNLAGYKRQEALRPYLSSEEDRKKGKKFARYQLGDLLLHLEKKHGEDWGKVYDEAWERIDKKVEGLSKHIKLEEERRSEDAQSKAALTDWLRAKASFVIEGLKEADKDEFCRCELKLQKWYGDLRGKPFAIEAENSILDISGFSKQYNCAFIWQKDGVKKLNLYLIINYFKGGKLRFKKIKPEAFEANRFYTVINKKSGEIVPMEVNFNFDDPNLIILPLAFGKRQGREFIWNDLLSLETGSLKLANGRVIEKTLYNRRTRQDEPALFVALTFERREVLDSSNIKPMNLIGVDRGENIPAVIALTDPEGCPLSRFKDSLGNPTHILRIGESYKEKQRTIQAKKEVEQRRAGGYSRKYASKAKNLADDMVRNTARDLLYYAVTQDAMLIFENLSRGFGRQGKRTFMAERQYTRMEDWLTAKLAYEGLPSKTYLSKTLAQYTSKTCSNCGFTITSADYDRVLEKLKKTATGWMTTINGKELKVEGQITYYNRYKRQNVVKDLSVELDRLSEESVNNDISSWTKGRSGEALSLLKKRFSHRPVQEKFVCLNCGFETHADEQAALNIARSWLFLRSQEYKKYQTNKTTGNTDKRAFVETWQSFYRKKLKEVWKPAV

SEQ ID NO: 40837 - protein, 978 aa, Artificial Sequence
  CasX variant
QEIKRINKIRRRLVKDSNTKKAGKTGPMKTLLVRVMTPDLRERLENLRKKPENIPQPISNTSRANLNKLLTDYTEMKKAILHVYWEEFQKDPVGLMSRVAQPASKKIDQNKLKPEMDEKGNLTTAGFACSQCGQPLFVYKLEQVSEKGKAYTNYFGRCNVAEHEKLILLAQLKPEKDSDEAVTYSLGKFGQRALDFYSIHVTKESTHPVKPLAQIAGNRYASGPVGKALSDACMGTIASFLSKYQDIIIEHQKVVKGNQKRLESLRELAGKENLEYPSVTLPPQPHTKEGVDAYNEVIARVRMWVNLNLWQKLKLSRDDAKPLLRLKGFPSFPLVERQANEVSWWDMVCNVKKLINEKKEDGKVFWQNLAGYKRQEALRPYLSSEEDRKKGKKFARYQLGDLLLHLEKKHGEDWGKVYDEAWERIDKKVEGLSKHIKLEEERRSEDAQSKAALTDWLRAKASFVIEGLKEADKDEFCRCELKLQKWYGDLRGKPFAIEAENSILDISGFSKQYNCAFIWQKDGVKKLNLYLIINYFKGGKLRFKKIKPEAFEANRFYTVINKKSGEIVPMEVNFNFDDPNLIILPLAFGKRQGREFIWNDLLSLETGSLKLANGRVIEKTLYNRRTRQDEPALFVALTFERREVLDSSNIKPMNLIGVDRGENIPAVIALTDPEGCPLSRFKDSLGNPTHILRIGESYKEKQRTIQAKKEVEQRRAGGYSRKYASKAKNLADDMVRNTARDLLYYAVTQDAMLIFENLSRGFGRQGKRTFMAERQYTRMEDWLTAKLAYEGLPSKTYLSKTLAQYTSKTCSNCGFTITSADYDRVLEKLKKTATGWMTTINGKELKVEGQITYYNRYKRQNVVKDLSVELDRLSEESVNNDISSWTKGRSGEALSLLKKRFSHRPVQEKFVCLNCGFETHADEQAALNIARSWLFLRSQEYKKYQTNKTTGNTDKRAFVETWQSFYRKKLKEVWKPAV

SEQ ID NO: 40838 - protein, 978 aa, Artificial Sequence
  CasX variant
QEIKRINKIRRRLVKDSNTKKAGKTGPMKTLLVRVMTPDLRERLENLRKKPENIPQPISNTSRANLNKLLTDYTEMKKAILHVYWEEFQKDPVGLMSRVAQPASKKIDQNKLKPEMDEKGNLTTAGFACSQCGQPLFVYKLEQVSEKGKAYTNYFGRCNVAEHEKLILLAQLKPEKDSDEAVTYSLGKFGQRALDFYSIHVTKESTHPVKPLAQIAGNRYASGPVGKALSDACMGTIASFLSKYQDIIIEHQKVVKGNQKRLESLRELAGKENLEYPSVTLPPQPHTKEGVDAYNEVIARVRMWVNLNLWQKLKLSRDDAKPLLRLKGFPSFPLVERQANEVDWWDMVCNVKKLINEKKEDGKVFWQNLAGYKRQEALRPYLSSEEDRKKGKKFARYQLGDLLLHLEKKHGEDWGKVYDEAWERIDKKVEGLSKHIKLEEERRSEDAQSKAALTDWLREKASFVIEGLKEADKDEFCRCELKLQKWYGDLRGKPFAIEAENSILDISGFSKQYNCAFIWQKDGVKKLNLYLIINYFKGGKLRFKKIKPEAFEANRFYTVINKKSGEIVPMEVNFNFDDPNLIILPLAFGKRQGREFIWNDLLSLETGSLKLANGRVIEKTLYNRRTRQDEPALFVALTFERREVLDSSNIKPMNLIGVDRGENIPAVIALTDPEGCPLSRFKDSLGNPTHILRIGESYKEKQRTIQAKKEVEQRRAGGYSRKYASKAKNLADDMVRNTARDLLYYAVTQDAMLIFENLSRGFGRQGKRTFMAERQYTRMEDWLTAKLAYEGLPSKTYLSKTLAQYTSKTCSNCGFTITSADYDRVLEKLKKTATGWMTTINGKELKVEGQITYYNRYKRQNVVKDLSVELDRLSEESVNNDISSWTKGRSGEALSLLKKRFSHRPVQEKFVCLNCGFETHADEQAALNIARSWLFLRSQEYKKYQTNKTTGNTDKRAFVETWQSFYRKKLKEVWKPAV

SEQ ID NO: 40839 - protein, 978 aa, Artificial Sequence
  CasX variant
QEIKRINKIRRRLVKDSNTKKAGKTGPMKTLLVRVMTPDLRERLENLRKKPENIPQPISNTSRANLNKLLTDYTEMKKAILHVYWEEFQKDPVGLMSRVAQPASKKIDQNKLKPEMDEKGNLTTAGFACSQCGQPLFVYKLEQVSEKGKAYTNYFGRCNVAEHEKLILLAQLKPEKDSDEAVTYSLGKFGQRALDFYSIHVTKESTHPVKPLAQIAGNRYASGPVGKALSDACMGTIASFLSKYQDIIIEHQKVVKGNQKRLESLRELAGKENLEYPSVTLPPQPHTKEGVDAYNEVIARVRMWVNLNLWQKLKLSRDDAKPLLRLKGFPSFPLVERQANEVDWWDMVCNVKKLINEKKEDGKVFWQNLAGYKRQEALRPYLSSEEDRKKGKKFARYQLGDLLLHLEKKHGEDWGKVYDEAWERIDKKVEGLSKHIKLEEERRSEDAQSKAALTDWLRAKASFVIEGLKEADKDEFCRCELKLQKWYGDLRGKPFAIEAENSILDISGFSKQYNCAFIWQKDGVKKLNLYLIINYFKGGKLRFKKIKPEAFEANRFYTVINKKSGEIVPMEVNFNFDDPNLIILPLAFGKRQGREFIWNDLLSLETGSLKLANGRVIEKTTYNRRTRQDEPALFVALTFERREVLDSSNIKPMNLIGVDRGENIPAVIALTDPEGCPLSRFKDSLGNPTHILRIGESYKEKQRTIQAKKEVEQRRAGGYSRKYASKAKNLADDMVRNTARDLLYYAVTQDAMLIFENLSRGFGRQGKRTFMAERQYTRMEDWLTAKLAYEGLPSKTYLSKTLAQYTSKTCSNCGFTITSADYDRVLEKLKKTATGWMTTINGKELKVEGQITYYNRYKRQNVVKDLSVELDRLSEESVNNDISSWTKGRSGEALSLLKKRFSHRPVQEKFVCLNCGFETHADEQAALNIARSWLFLRSQEYKKYQTNKTTGNTDKRAFVETWQSFYRKKLKEVWKPAV

SEQ ID NO: 40840 - protein, 978 aa, Artificial Sequence
  CasX variant
QEIKRINKIRRRLVKDSNTKKAGKTGPMKTLLVRVMTPDLRERLENLRKKPENIPQPISNTSRANLNKLLTDYTEMKKAILHVYWEEFQKDPVGLMSRVAQPASKKIDQNKLKPEMDEKGNLTTAGFACSQCGQPLFVYKLEQVSEKGKAYTNYFGRCNVAEHEKLILLAQLKPEKDSDEAVTYSLGKFGQRALDFYSIHVTKESTHPVKPLAQIAGNRYASGPVGKALSDACMGTIASFLSKYQDIIIEHQKVVKGNQKRLESLRELAGKENLEYPSVTLPPQPHTKEGVDAYNEVIARVRMWVNLNLWQKLKLSRDDAKPLLRLKGFPSFPLVERQANEVDWWDMVCNVKKLINEKKEDGKVFWQNLAGYKRQEANRPYLSSEEDRKKGKKFARYQLGDLLLHLEKKHGEDWGKVYDEAWERIDKKVEGLSKHIKLEEERRSEDAQSKAALTDWLRAKASFVIEGLKEADKDEFCRCELKLQKWYGDLRGKPFAIEAENSILDISGFSKQYNCAFIWQKDGVKKLNLYLIINYFKGGKLRFKKIKPEAFEANRFYTVINKKSGEIVPMEVNFNFDDPNLIILPLAFGKRQGREFIWNDLLSLETGSLKLANGRVIEKTLYNRRTRQDEPALFVALTFERREVLDSSNIKPMNLIGVDRGENIPAVIALTDPEGCPLSRFKDSLGNPTHILRIGESYKEKQRTIQAKKEVEQRRAGGYSRKYASKAKNLADDMVRNTARDLLYYAVTQDAMLIFENLSRGFGRQGKRTFMAERQYTRMEDWLTAKLAYEGLPSKTYLSKTLAQYTSKTCSNCGFTITSADYDRVLEKLKKTATGWMTTINGKELKVEGQITYYNRYKRQNVVKDLSVELDRLSEESVNNDISSWTKGRSGEALSLLKKRFSHRPVQEKFVCLNCGFETHADEQAALNIARSWLFLRSQEYKKYQTNKTTGNTDKRAFVETWQSFYRKKLKEVWKPAV

SEQ ID NO: 40841 - protein, 978 aa, Artificial Sequence
  CasX variant
QEIKRINKIRRRLVKDSNTKKAGKTGPMKTLLVRVMTPDLRERLENLRKKPENIPQPISNTSRANLNKLLTDYTEMKKAILHVYWEEFQKDPVGLMSRVAQPASKKIDQNKLKPEMDEKGNLTTAGFACSQCGQPLFVYKLEQVSEKGKAYTNYFGRCNVAEHEKLILLAQLKPEKDSDEAVTYSLGKFGQRALDFYSIHVTKESTHPVKPLAQIAGNRYASGPVGKALSDACMGTIASFLSKYQDIIIEHQKVVKGNQKRLESLRELAGKENLEYPSVTLPPQPHTKEGVDAYNEVIARVRMWVNLNLWQKLKLSRDDAKPLLRLKGFPSFPLVERQANEVDWWDMVCNVKKLINEKKEDGKVFWQNLAGYKRQEALRPYLSSEEDRKKGKKFARYQLGDLLLHLEKKHGEDWGKVYDEAWERIDKKVEGLSKHIKLEELRRSEDAQSKAALTDWLRAKASFVIEGLKEADKDEFCRCELKLQKWYGDLRGKPFAIEAENSILDISGFSKQYNCAFIWQKDGVKKLNLYLIINYFKGGKLRFKKIKPEAFEANRFYTVINKKSGEIVPMEVNFNFDDPNLIILPLAFGKRQGREFIWNDLLSLETGSLKLANGRVIEKTLYNRRTRQDEPALFVALTFERREVLDSSNIKPMNLIGVDRGENIPAVIALTDPEGCPLSRFKDSLGNPTHILRIGESYKEKQRTIQAKKEVEQRRAGGYSRKYASKAKNLADDMVRNTARDLLYYAVTQDAMLIFENLSRGFGRQGKRTFMAERQYTRMEDWLTAKLAYEGLPSKTYLSKTLAQYTSKTCSNCGFTITSADYDRVLEKLKKTATGWMTTINGKELKVEGQITYYNRYKRQNVVKDLSVELDRLSEESVNNDISSWTKGRSGEALSLLKKRFSHRPVQEKFVCLNCGFETHADEQAALNIARSWLFLRSQEYKKYQTNKTTGNTDKRAFVETWQSFYRKKLKEVWKPAV

SEQ ID NO: 40842 - protein, 976 aa, Artificial Sequence
  CasX variant
QEIKRINKIRRRLVKDSNTKKAGKTGPMKTLLVRVMTPDLRERLENLRKKPENIPQPISNTSRANLNKLLTDYTEMKKAILHVYWEEFQKDPVGLMSRVAQPASKKIDQNKLKPEMDEKGNLTTAGFACSQCGQPLFVYKLEQVSEKGKAYTNYFGRCNVAEHEKLILLAQLKPEKDSDEAVTYSLGKFGQRALDFYSIHVTKESTHPVKPLAQIAGNRYASGPVGKALSDACMGTIASFLSKYQDIIIEHQKVVKGNQKRLESLRELAGKENLEYPSVTLPPQPHTKEGVDAYNEVIARVRMWVNLNLWQKLKLSRDDAKPLLRLKGFPSFPLVERQANEVDWWDMVCNVKKLINEKKEDGKVFWQNLAGYKRQEALRPYLSSEEDRKKGKKFARYQLGDLLLHLEKKHGEDWGKVYDEAWERIDKKVEGLSKHIKLEEERRSEDAQSKAALTDWLRAKASFVIEGLKEADKDERCELKLQKWYGDLRGKPFAIEAENSILDISGFSKQYNCAFIWQKDGVKKLNLYLIINYFKGGKLRFKKIKPEAFEANRFYTVINKKSGEIVPMEVNFNFDDPNLIILPLAFGKRQGREFIWNDLLSLETGSLKLANGRVIEKTLYNRRTRQDEPALFVALTFERREVLDSSNIKPMNLIGVDRGENIPAVIALTDPEGCPLSRFKDSLGNPTHILRIGESYKEKQRTIQAKKEVEQRRAGGYSRKYASKAKNLADDMVRNTARDLLYYAVTQDAMLIFENLSRGFGRQGKRTFMAERQYTRMEDWLTAKLAYEGLPSKTYLSKTLAQYTSKTCSNCGFTITSADYDRVLEKLKKTATGWMTTINGKELKVEGQITYYNRYKRQNVVKDLSVELDRLSEESVNNDISSWTKGRSGEALSLLKKRFSHRPVQEKFVCLNCGFETHADEQAALNIARSWLFLRSQEYKKYQTNKTTGNTDKRAFVETWQSFYRKKLKEVWKPAV

SEQ ID NO: 40843 - protein, 976 aa, Artificial Sequence
  CasX variant
QEIKRINKIRRRLVKDSNTKKAGKTGPMKTLLVRVMTPDLRERLENLRKKPENIPQPISNTSRANLNKLLTDYTEMKKAILHVYWEEFQKDPVGLMSRVAQPASKKIDQNKLKPEMDEKGNLTTAGFACSQCGQPLFVYKLEQVSEKGKAYTNYFGRCNVAEHEKLILLAQLKPEKDSDEAVTYSLGKFGQRALDFYSIHVTKESTHPVKPLAQIAGNRYASGPVGKALSDACMGTIASFLSKYQDIIIEHQKVVKGNQKRLESLRELAGKENLEYPSVTLPPQPHTKEGVDAYNEVIARVRMWVNLNLWQKLKLSRDDAKPLLRLKGFPSFPLVERQANEVDWWDMVCNVKKLINEKKEDGKVFWQNLAGYKRALRPYLSSEEDRKKGKKFARYQLGDLLLHLEKKHGEDWGKVYDEAWERIDKKVEGLSKHIKLEEERRSEDAQSKAALTDWLRAKASFVIEGLKEADKDEFCRCELKLQKWYGDLRGKPFAIEAENSILDISGFSKQYNCAFIWQKDGVKKLNLYLIINYFKGGKLRFKKIKPEAFEANRFYTVINKKSGEIVPMEVNFNFDDPNLIILPLAFGKRQGREFIWNDLLSLETGSLKLANGRVIEKTLYNRRTRQDEPALFVALTFERREVLDSSNIKPMNLIGVDRGENIPAVIALTDPEGCPLSRFKDSLGNPTHILRIGESYKEKQRTIQAKKEVEQRRAGGYSRKYASKAKNLADDMVRNTARDLLYYAVTQDAMLIFENLSRGFGRQGKRTFMAERQYTRMEDWLTAKLAYEGLPSKTYLSKTLAQYTSKTCSNCGFTITSADYDRVLEKLKKTATGWMTTINGKELKVEGQITYYNRYKRQNVVKDLSVELDRLSEESVNNDISSWTKGRSGEALSLLKKRFSHRPVQEKFVCLNCGFETHADEQAALNIARSWLFLRSQEYKKYQTNKTTGNTDKRAFVETWQSFYRKKLKEVWKPAV

SEQ ID NO: 40844 - protein, 978 aa, Artificial Sequence
  CasX variant
QEIKRINKIRRRLVKDSNTKKAGKTGPMKTLLVRVMTPDLRERLENLRKKPENIPQPISNTSRANLNKLLTDYTEMKKAILHVYWEEFQKDPVGLMSRVAQPASKKIDQNKLKPEMDEKGNLTTAGFACSQCGQPLFVYKLEQVSEKGKAYTNYFGRCNVAEHEKLILLAQLKPEKDSDEAVTYSLGKFGQRALDFYSIHVTKESTHPVKPLAQIAGNRYASGPVGKALSDACMGTIASFLSKYQDIIIEHQKVVKGNQKRLESLRELAGKENLEYPSVTLPPQPHTKEGVDAYNEVIARVRMWVNLNLWQKLKLSRDDAKPLLRLKGFPSFPLVERQANEVDWWDMVCNVKKLINEKKEDGKVFWQNLAGYKRQEALRPYLSSEEDRQKGKKFARYQLGDLLLHLEKKHGEDWGKVYDEAWERIDKKVEGLSKHIKLEEERRSEDAQSKAALTDWLRAKASFVIEGLKEADKDEFCRCELKLQKWYGDLRGKPFAIEAENSILDISGFSKQYNCAFIWQKDGVKKLNLYLIINYFKGGKLRFKKIKPEAFEANRFYTVINKKSGEIVPMEVNFNFDDPNLIILPLAFGKRQGREFIWNDLLSLETGSLKLANGRVIEKTLYNRRTRQDEPALFVALTFERREVLDSSNIKPMNLIGVDRGENIPAVIALTDPEGCPLSRFKDSLGNPTHILRIGESYKEKQRTIQAKKEVEQRRAGGYSRKYASKAKNLADDMVRNTARDLLYYAVTQDAMLIFENLSRGFGRQGKRTFMAERQYTRMEDWLTAKLAYEGLPSKTYLSKTLAQYTSKTCSNCGFTITSADYDRVLEKLKKTATGWMTTINGKELKVEGQITYYNRYKRQNVVKDLSVELDRLSEESVNNDISSWTKGRSGEALSLLKKRFSHRPVQEKFVCLNCGFETHADEQAALNIARSWLFLRSQEYKKYQTNKTTGNTDKRAFVETWQSFYRKKLKEVWKPAV

SEQ ID NO: 40845 - protein, 978 aa, Artificial Sequence
  CasX variant
QEIKRLNKIRRRLVKDSNTKKAGKTGPMKTLLVRVMTPDLRERLENLRKKPENIPQPISNTSRANLNKLLTDYTEMKKAILHVYWEEFQKDPVGLMSRVAQPASKKIDQNKLKPEMDEKGNLTTAGFACSQCGQPLFVYKLEQVSEKGKAYTNYFGRCNVAEHEKLILLAQLKPEKDSDEAVTYSLGKFGQRALDFYSIHVTKESTHPVKPLAQIAGNRYASGPVGKALSDACMGTIASFLSKYQDIIIEHQKVVKGNQKRLESLRELAGKENLEYPSVTLPPQPHTKEGVDAYNEVIARVRMWVNLNLWQKLKLSRDDAKPLLRLKGFPSFPLVERQANEVDWWDMVCNVKKLINEKKEDGKVFWQNLAGYKRQEALRPYLSSEEDRKKGKKFARYQLGDLLLHLEKKHGEDWGKVYDEAWERIDKKVEGLSKHIKLEEERRSEDAQSKAALTDWLRAKASFVIEGLKEADKDEFCRCELKLQKWYGDLRGKPFAIEAENSILDISGFSKQYNCAFIWQKDGVKKLNLYLIINYFKGGKLRFKKIKPEAFEANRFYTVINKKSGEIVPMEVNFNFDDPNLIILPLAFGKRQGREFIWNDLLSLETGSLKLANGRVIEKTLYNRRTRQDEPALFVALTFERREVLDSSNIKPMNLIGVDRGENIPAVIALTDPEGCPLSRFKDSLGNPTHILRIGESYKEKQRTIQAKKEVEQRRAGGYSRKYASKAKNLADDMVRNTARDLLYYAVTQDAMLIFENLSRGFGRQGKRTFMAERQYTRMEDWLTAKLAYEGLPSKTYLSKTLAQYTSKTCSNCGFTITSADYDRVLEKLKKTATGWMTTINGKELKVEGQITYYNRYKRQNVVKDLSVELDRLSEESVNNDISSWTKGRSGEALSLLKKRFSHRPVQEKFVCLNCGFETHADEQAALNIARSWLFLRSQEYKKYQTNKTTGNTDKRAFVETWQSFYRKKLKEVWKPAV

SEQ ID NO: 40846 - protein, 978 aa, Artificial Sequence
  CasX variant
QEIKRINKIRRRLVKDSNTKKAGKTGPMKTLLVRVMTPDLRERLENLRKKPENIPQPISNTSRANLNKLLTDYTEMKKAILHVYWEEFQKDPVGLMSRVAQPASKKIDQNKLKPEMDEKGNLTTAGFACSQCGQPLFVYKLEQVSEKGKAYTNYFGRCNVAEHEKLILLAQLKPEKDSDEAVTYSLGKFGQRALDFYSIHVTKESTHPVKPLAQIAGNRYASGPVGKALSDACMGTIASFLSKYQDIIIEHQKVVKGNQKRLESLRELAGKENLEYPSVTLPPQPHTKEGVDAYNEVIARVRMWVNLNLWQKLKLSRDDAKPLLRLKGFPSFPLVERQANEVDWWDMVCNVKKLINEKKEDGKVFWQNLAGYKRQEALRPYLSSEEDRKKGKKFARYQLGDLLLHLEKKHGEDWGKVYDEAWERIDKKVEGLSKHIKLEEERRSEDAQSKAALTDWLDAKASFVIEGLKEADKDEFCRCELKLQKWYGDLRGKPFAIEAENSILDISGFSKQYNCAFIWQKDGVKKLNLYLIINYFKGGKLRFKKIKPEAFEANRFYTVINKKSGEIVPMEVNFNFDDPNLIILPLAFGKRQGREFIWNDLLSLETGSLKLANGRVIEKTLYNRRTRQDEPALFVALTFERREVLDSSNIKPMNLIGVDRGENIPAVIALTDPEGCPLSRFKDSLGNPTHILRIGESYKEKQRTIQAKKEVEQRRAGGYSRKYASKAKNLADDMVRNTARDLLYYAVTQDAMLIFENLSRGFGRQGKRTFMAERQYTRMEDWLTAKLAYEGLPSKTYLSKTLAQYTSKTCSNCGFTITSADYDRVLEKLKKTATGWMTTINGKELKVEGQITYYNRYKRQNVVKDLSVELDRLSEESVNNDISSWTKGRSGEALSLLKKRFSHRPVQEKFVCLNCGFETHADEQAALNIARSWLFLRSQEYKKYQTNKTTGNTDKRAFVETWQSFYRKKLKEVWKPAV

SEQ ID NO: 40847 - protein, 976 aa, Artificial Sequence
  CasX variant
QEIKRINKIRRRLVKDSNTKKAGKTGPMKTLLVRVMTPDLRERLENLRKKPENIPQPISNTSRANLNKLLTDYTEMKKAILHVYWEEFQKDPVGLMSRVAQPASKKIDQNKLKPEMDEKGNLTTAGFACSQCGQPLFVYKLEQVSEKGKAYTNYFGRCNVAEHEKLILLAQLKPEKDSDEAVTYSLGKFGQRALDFYSIHVTKESTHPVKPLAQIAGNRYASGPVGKALSDACMGTIASFLSKYQDIIIEHQKVVKGNQKRLESLRELAGKENLEYPSVTLPPQPHTKEGVDAYNEVIARVRMWVNLNLWQKLKLSRDDAKPLLRLKGFPSFPLVERQANEVDWWDMVCNVKKLINEKKEDGKVFWQNLAGYKRQEALRPYLSSEEDRKKGKKFARYQLGDLLLHLEKKHGEDWGKVYDEAWERIDKKVEGLSKHIKLEEERRSEDAQSKAALTDWLRAKASFVIEGLKEADKDEFCRCELKLQKWYGDLRGKPFAIEAENSDISGFSKQYNCAFIWQKDGVKKLNLYLIINYFKGGKLRFKKIKPEAFEANRFYTVINKKSGEIVPMEVNFNFDDPNLIILPLAFGKRQGREFIWNDLLSLETGSLKLANGRVIEKTLYNRRTRQDEPALFVALTFERREVLDSSNIKPMNLIGVDRGENIPAVIALTDPEGCPLSRFKDSLGNPTHILRIGESYKEKQRTIQAKKEVEQRRAGGYSRKYASKAKNLADDMVRNTARDLLYYAVTQDAMLIFENLSRGFGRQGKRTFMAERQYTRMEDWLTAKLAYEGLPSKTYLSKTLAQYTSKTCSNCGFTITSADYDRVLEKLKKTATGWMTTINGKELKVEGQITYYNRYKRQNVVKDLSVELDRLSEESVNNDISSWTKGRSGEALSLLKKRFSHRPVQEKFVCLNCGFETHADEQAALNIARSWLFLRSQEYKKYQTNKTTGNTDKRAFVETWQSFYRKKLKEVWKPAV

SEQ ID NO: 40848 - protein, 978 aa, Artificial Sequence
  CasX variant
QEIKRINKIRRRLVKDSNTKKAGKTGPMKTLLVRVMTPDLRERLENLRKKPENIPQPISNTSRANLNKLLTDYTEMKKAILHVYWEEFQKDPVGLMSRVAQPASKKIDQNKLKPEMDEKGNLTTAGFACSQCGQPLFVYKLEQVSEKGKAYTNYVGRCNVAEHEKLILLAQLKPEKDSDEAVTYSLGKFGQRALDFYSIHVTKESTHPVKPLAQIAGNRYASGPVGKALSDACMGTIASFLSKYQDIIIEHQKVVKGNQKRLESLRELAGKENLEYPSVTLPPQPHTKEGVDAYNEVIARVRMWVNLNLWQKLKLSRDDAKPLLRLKGFPSFPLVERQANEVDWWDMVCNVKKLINEKKEDGKVFWQNLAGYKRQEALRPYLSSEEDRKKGKKFARYQLGDLLLHLEKKHGEDWGKVYDEAWERIDKKVEGLSKHIKLEEERRSEDAQSKAALTDWLRAKASFVIEGLKEADKDEFCRCELKLQKWYGDLRGKPFAIEAENSILDISGFSKQYNCAFIWQKDGVKKLNLYLIINYFKGGKLRFKKIKPEAFEANRFYTVINKKSGEIVPMEVNFNFDDPNLIILPLAFGKRQGREFIWNDLLSLETGSLKLANGRVIEKTLYNRRTRQDEPALFVALTFERREVLDSSNIKPMNLIGVDRGENIPAVIALTDPEGCPLSRFKDSLGNPTHILRIGESYKEKQRTIQAKKEVEQRRAGGYSRKYASKAKNLADDMVRNTARDLLYYAVTQDAMLIFENLSRGFGRQGKRTFMAERQYTRMEDWLTAKLAYEGLPSKTYLSKTLAQYTSKTCSNCGFTITSADYDRVLEKLKKTATGWMTTINGKELKVEGQITYYNRYKRQNVVKDLSVELDRLSEESVNNDISSWTKGRSGEALSLLKKRFSHRPVQEKFVCLNCGFETHADEQAALNIARSWLFLRSQEYKKYQTNKTTGNTDKRAFVETWQSFYRKKLKEVWKPAV

SEQ ID NO: 40849 - protein, 979 aa, Artificial Sequence
  CasX variant
QEIKRINKIRRRLVKDSNTKKAGKTGPMKTLLVRVMTPDLRERLENLRKKPENIPQPISNTSRANLNKLLTDYTEMKKAILHVYWEEFQKDPVGLMSRVAQPASKKIDQNKLKPEMDEKGNLTTAGFACSQCGQPLFVYKLEQVSEKGKAYTNYFGRCNVAEHEKLILLAQLKPEKDSDEAVTYSLGKFGQRALDFYSIHVTKESTHPVKPLAQIAGNRYASGPVGKALSDACMGTIASFLSKYQDIIIEHQKVVKGNQKRLESLRELAGKENLEYPSVTLPPQPHTKEGVDAYNEVIARVRMWVNLNLWQKLKLSRDDAKPLLRLKGFPSFPLVERQANEVDWWDMVCNVKKLINGEKKEDGKVFWQNLAGYKRQEALRPYLSSEEDRKKGKKFARYQLGDLLLHLEKKHGEDWGKVYDEAWERIDKKVEGLSKHIKLEEERRSEDAQSKAALTDWLRAKASFVIEGLKEADKDEFCRCELKLQKWYGDLRGKPFAIEAENSILDISGFSKQYNCAFIWQKDGVKKLNLYLIINYFKGGKLRFKKIKPEAFEANRFYTVINKKSGEIVPMEVNFNFDDPNLIILPLAFGKRQGREFIWNDLLSLETGSLKLANGRVIEKTLYNRRTRQDEPALFVALTFERREVLDSSNIKPMNLIGVDRGENIPAVIALTDPEGCPLSRFKDSLGNPTHILRIGESYKEKQRTIQAKKEVEQRRAGGYSRKYASKAKNLADDMVRNTARDLLYYAVTQDAMLIFENLSRGFGRQGKRTFMAERQYTRMEDWLTAKLAYEGLPSKTYLSKTLAQYTSKTCSNCGFTITSADYDRVLEKLKKTATGWMTTINGKELKVEGQITYYNRYKRQNVVKDLSVELDRLSEESVNNDISSWTKGRSGEALSLLKKRFSHRPVQEKFVCLNCGFETHADEQAALNIARSWLFLRSQEYKKYQTNKTTGNTDKRAFVETWQSFYRKKLKEVWKPAV

SEQ ID NO: 40850 - protein, 978 aa, Artificial Sequence
  CasX variant
QEIKRINKIRRRLVKDSNTKKAGKTGPMKTLLVRVMTPDLRERLENLRKKPENIPQPISNTSRANLNKLLTDYTEMKKAILHVYWEEFQKDPVGLMSRVAQPASKKIDQNKLKPEMDEKGNLTTAGFACSQCGQPLFVYKLEQVSEKGKAYTNYFGRCNVAEHEKLILLAQLKPEKDSDEAVTYSLGKFGQRALDFYSIHVTKESTHPVKPLAQIAGNRFASGPVGKALSDACMGTIASFLSKYQDIIIEHQKVVKGNQKRLESLRELAGKENLEYPSVTLPPQPHTKEGVDAYNEVIARVRMWVNLNLWQKLKLSRDDAKPLLRLKGFPSFPLVERQANEVDWWDMVCNVKKLINEKKEDGKVFWQNLAGYKRQEALRPYLSSEEDRKKGKKFARYQLGDLLLHLEKKHGEDWGKVYDEAWERIDKKVEGLSKHIKLEEERRSEDAQSKAALTDWLRAKASFVIEGLKEADKDEFCRCELKLQKWYGDLRGKPFAIEAENSILDISGFSKQYNCAFIWQKDGVKKLNLYLIINYFKGGKLRFKKIKPEAFEANRFYTVINKKSGEIVPMEVNFNFDDPNLIILPLAFGKRQGREFIWNDLLSLETGSLKLANGRVIEKTLYNRRTRQDEPALFVALTFERREVLDSSNIKPMNLIGVDRGENIPAVIALTDPEGCPLSRFKDSLGNPTHILRIGESYKEKQRTIQAKKEVEQRRAGGYSRKYASKAKNLADDMVRNTARDLLYYAVTQDAMLIFENLSRGFGRQGKRTFMAERQYTRMEDWLTAKLAYEGLPSKTYLSKTLAQYTSKTCSNCGFTITSADYDRVLEKLKKTATGWMTTINGKELKVEGQITYYNRYKRQNVVKDLSVELDRLSEESVNNDISSWTKGRSGEALSLLKKRFSHRPVQEKFVCLNCGFETHADEQAALNIARSWLFLRSQEYKKYQTNKTTGNTDKRAFVETWQSFYRKKLKEVWKPAV

SEQ ID NO: 40851 - protein, 978 aa, Artificial Sequence
  CasX variant
QEIKRINKIRRRLVKDSNTKKAGKTGPMKTLLVRVMTPDLRERLENLRKKPENIPQPISNTSRANLNKLLTDYTEMKKAILHVYWEEFQKDPVGLMSRVAQPASKKIDQNKLKPEMDEKGNLTTAGFACSQCGQPLFVYKLEQVSEKGKAYTNYFGRCNVAEHEKLILLAQLKPEKDSDEAVTYSLGKFGQRALDFYSIHVTKESTHPVKPLAQIAGNRYASGPVGKALSDACMGTIASFLSKYQDIIIEHQKVVKGNQKRLESLRELAGKENLEYPSVTLPPQPHTKEGVDAYNEVIARVRMWVNLNLWQKLKLSRDDAKPLLRLKGFPSFPLVERQANEVDWWDMVCNVKKLINEKKEDGKVFWQNLAGYKRQEALRPYLSSEEDRKKGKKFARYQLGDLLLHLEKKHGEDWGKVYDEAWERIDKKVEGLSKHIKLEEERRSEDAQSKAALTDWLRAKASFVIEGLKEADKDEFCRCELKLQKWYGDLRGKPFAIEAENSILDISGFSKQYNCAFIWQKDGVKKLNLYLIINYFKGGKLRFKKIKPEAFEANRFYTVINKKSGEIVPMEVNFNFDDPNLIILPLAFGKRQGREFIWNDLLSLETGSLKLANGRVIEKTLYNRRTRQDEPALFVALTFERREVLDSSNIKPMNLIGVDRGENIPAVIALTDPEGCPLSRFKDSLGNPTHILRIGESYKEKQRTIQAKKEVEQRRAGGYSRKYASKAKNLADDMVRNTARDLLYYAVTQDAMLIFENLSRGFGRQGKRTFMAERQYTRMEDWYTAKLAYEGLPSKTYLSKTLAQYTSKTCSNCGFTITSADYDRVLEKLKKTATGWMTTINGKELKVEGQITYYNRYKRQNVVKDLSVELDRLSEESVNNDISSWTKGRSGEALSLLKKRFSHRPVQEKFVCLNCGFETHADEQAALNIARSWLFLRSQEYKKYQTNKTTGNTDKRAFVETWQSFYRKKLKEVWKPAV

SEQ ID NO: 40852 - protein, 979 aa, Artificial Sequence
  CasX variant
QEIKRINKIRRRLVKDSNTKKAGKTGPMKTLLVRVMTPDLRERLENLRKKPENIPQPISNTSRANLNKLLTDYTEMKKAILHVYWEEFQKDPVGLMSRVAQPASKKIDQNKLKPEMDEKGNLTTAGFACSQCGQPLFVYKLEQVSEKGKAYTNYFGRCNVAEHEKLILLAQLKPEKDSDEAVTYSLGKFGQRALDFYSIHVTKESTHPVKPLAQIAGNRYASGPVGKALSDACMGTIASFLSKYQDIIIEHQKVVKGNQKRLESLRELAGKENLEYPSVTLPPQPHTKEGVDAYNEVIARVRMWVNLNLWQKLKLSRDDAKPLLRLKGFPSFPLVERQANEVDWWDMVPCNVKKLINEKKEDGKVFWQNLAGYKRQEALRPYLSSEEDRKKGKKFARYQLGDLLLHLEKKHGEDWGKVYDEAWERIDKKVEGLSKHIKLEEERRSEDAQSKAALTDWLRAKASFVIEGLKEADKDEFCRCELKLQKWYGDLRGKPFAIEAENSILDISGFSKQYNCAFIWQKDGVKKLNLYLIINYFKGGKLRFKKIKPEAFEANRFYTVINKKSGEIVPMEVNFNFDDPNLIILPLAFGKRQGREFIWNDLLSLETGSLKLANGRVIEKTLYNRRTRQDEPALFVALTFERREVLDSSNIKPMNLIGVDRGENIPAVIALTDPEGCPLSRFKDSLGNPTHILRIGESYKEKQRTIQAKKEVEQRRAGGYSRKYASKAKNLADDMVRNTARDLLYYAVTQDAMLIFENLSRGFGRQGKRTFMAERQYTRMEDWLTAKLAYEGLPSKTYLSKTLAQYTSKTCSNCGFTITSADYDRVLEKLKKTATGWMTTINGKELKVEGQITYYNRYKRQNVVKDLSVELDRLSEESVNNDISSWTKGRSGEALSLLKKRFSHRPVQEKFVCLNCGFETHADEQAALNIARSWLFLRSQEYKKYQTNKTTGNTDKRAFVETWQSFYRKKLKEVWKPAV

SEQ ID NO: 40853 - protein, 979 aa, Artificial Sequence
  CasX variant
QEIKRINKIRRRLVKDSNTKKAGKTGPMKTLLVRVMTPDLRERLENLRKKPENIPQPISNTSRANLNKLLTDYTEMKKAILHVYWEEFQKDPVGLMSRVAQPASKKIDQNKLKPEMDEKGNLTTAGFACSQCGQPLFVYKLEQVSEKGKAYTNYFGRCNVAEHEKLILLAQLKPEKDSDEAVTYSLGKFGQRALDFYSIHVTKESTHPVKPLAQTIAGNRYASGPVGKALSDACMGTIASFLSKYQDIIIEHQKVVKGNQKRLESLRELAGKENLEYPSVTLPPQPHTKEGVDAYNEVIARVRMWVNLNLWQKLKLSRDDAKPLLRLKGFPSFPLVERQANEVDWWDMVCNVKKLINEKKEDGKVFWQNLAGYKRQEALRPYLSSEEDRKKGKKFARYQLGDLLLHLEKKHGEDWGKVYDEAWERIDKKVEGLSKHIKLEEERRSEDAQSKAALTDWLRAKASFVIEGLKEADKDEFCRCELKLQKWYGDLRGKPFAIEAENSILDISGFSKQYNCAFIWQKDGVKKLNLYLIINYFKGGKLRFKKIKPEAFEANRFYTVINKKSGEIVPMEVNFNFDDPNLIILPLAFGKRQGREFIWNDLLSLETGSLKLANGRVIEKTLYNRRTRQDEPALFVALTFERREVLDSSNIKPMNLIGVDRGENIPAVIALTDPEGCPLSRFKDSLGNPTHILRIGESYKEKQRTIQAKKEVEQRRAGGYSRKYASKAKNLADDMVRNTARDLLYYAVTQDAMLIFENLSRGFGRQGKRTFMAERQYTRMEDWLTAKLAYEGLPSKTYLSKTLAQYTSKTCSNCGFTITSADYDRVLEKLKKTATGWMTTINGKELKVEGQITYYNRYKRQNVVKDLSVELDRLSEESVNNDISSWTKGRSGEALSLLKKRFSHRPVQEKFVCLNCGFETHADEQAALNIARSWLFLRSQEYKKYQTNKTTGNTDKRAFVETWQSFYRKKLKEVWKPAV

SEQ ID NO: 40854 - protein, 978 aa, Artificial Sequence
  CasX variant
QEIKRINKIRRRLVKDSNTKKAGKTGPMKTLLVRVMTPDLRERLENLRKKPENIPQPISNTSRANLNKLLTDYTEMKKAILHVYWEEFQKDPVGLMSRVAQPASKKIDQNKLKPEMDEKGNLTTAGFACSQCGQPLFVYKLEQVSEKGKAYTNYFGRCNVAEHEKLILLAQLKPEKDSDEAVTYSLGKFGQRALDFYSIHVTKESTHPVKPLAQIAGNRYASGPVGKALSDACMGTIASFLSKYQDIIIEHQKVVKGNQKRLESLRELAGKENLEYPSVTLPPQPHTKEGVDAYNEVIARVRMWVNLNLWQKLKLSRDDAKPLLRLKGFPSFPLVERQANEVDWWDMVCNVKKLINEKKEDGKVFWQNLAGYKRQEALRPYLSSEEDRKKGKKFARYQLGDLLLHLEKKHGEDWGKVYDEAWERIDKKVEGLSKHIKLEEERRSEDAQSKAALTDWLRAKASFVIEGLKEADKDEFCRCELKLQKWYGDLRGKPFAIEAENSILDISGFSKQYNCAFIWQKDGVKKLNLYLIINYFKGGKLRFKKIKPEAFEANRFYTVINKKSGEIVPMEVNFNFDDPNLIILPLAFGKRQGREFIWNDLLSLETGSLKLANGRVIEKTLYNRRTRQDEPALFVALTFERREVLDSSNIKPMNLIGVDRGENIPAVIALTDPEGCPLSRFKDSLGNPTHILRIGESYKEKQRTIQAKKEVEQRRAGGYSRKYASKAKNLADDMVRNTARDLLYYAVTQDAMLIFENLSRGFGRQGKRTFMAERQYTRMEDWLTAKLAYEGLPSKTYLSKTLAQYTSKTCSNCGFTITSADYDRVLEKLKKTATGWMTTINGKELKVEGQITYYNRYKRQNVVKDLSVELDRLSEESVNNDISSWTKGRSGEALSLLKKRFSHRPCQEKFVCLNCGFETHADEQAALNIARSWLFLRSQEYKKYQTNKTTGNTDKRAFVETWQSFYRKKLKEVWKPAV

SEQ ID NO: 40855 - protein, 979 aa, Artificial Sequence
  CasX variant
QEIKRINKIRRRLVKDSNTKKAGKTGPMKTLLVRVMTPDLRERLENLPRKKPENIPQPISNTSRANLNKLLTDYTEMKKAILHVYWEEFQKDPVGLMSRVAQPASKKIDQNKLKPEMDEKGNLTTAGFACSQCGQPLFVYKLEQVSEKGKAYTNYFGRCNVAEHEKLILLAQLKPEKDSDEAVTYSLGKFGQRALDFYSIHVTKESTHPVKPLAQIAGNRYASGPVGKALSDACMGTIASFLSKYQDIIIEHQKVVKGNQKRLESLRELAGKENLEYPSVTLPPQPHTKEGVDAYNEVIARVRMWVNLNLWQKLKLSRDDAKPLLRLKGFPSFPLVERQANEVDWWDMVCNVKKLINEKKEDGKVFWQNLAGYKRQEALRPYLSSEEDRKKGKKFARYQLGDLLLHLEKKHGEDWGKVYDEAWERIDKKVEGLSKHIKLEEERRSEDAQSKAALTDWLRAKASFVIEGLKEADKDEFCRCELKLQKWYGDLRGKPFAIEAENSILDISGFSKQYNCAFIWQKDGVKKLNLYLIINYFKGGKLRFKKIKPEAFEANRFYTVINKKSGEIVPMEVNFNFDDPNLIILPLAFGKRQGREFIWNDLLSLETGSLKLANGRVIEKTLYNRRTRQDEPALFVALTFERREVLDSSNIKPMNLIGVDRGENIPAVIALTDPEGCPLSRFKDSLGNPTHILRIGESYKEKQRTIQAKKEVEQRRAGGYSRKYASKAKNLADDMVRNTARDLLYYAVTQDAMLIFENLSRGFGRQGKRTFMAERQYTRMEDWLTAKLAYEGLPSKTYLSKTLAQYTSKTCSNCGFTITSADYDRVLEKLKKTATGWMTTINGKELKVEGQITYYNRYKRQNVVKDLSVELDRLSEESVNNDISSWTKGRSGEALSLLKKRFSHRPVQEKFVCLNCGFETHADEQAALNIARSWLFLRSQEYKKYQTNKTTGNTDKRAFVETWQSFYRKKLKEVWKPAV

SEQ ID NO: 40856 - protein, 978 aa, Artificial Sequence
  CasX variant
QEIKRINKIRRRLVKDSNTKKAGKTGPMKTLLVRVMTPDLRERLENLRKKPENIPQPISNTSRANLNKLLTDYTEMKKAILHVYWEEFQKDPVGLMSRVAQPASKKIDQNKLKPEMDEKGNLTTAGFACSQCGQPLFVYKLEQVSEKGKAYTNYFGRCNVAEHEKLILLAQLKPEKDSDEAVTYSLGKFGQRALDFYSIHVTKESTHPVKPLAQIAGNRYASGPVGKALSDACMGTIASFLSKYQDIIIEHQKVVKGNQKRLESLRELAGKENLEYPSVTLPPQPHTKEGVDAYNEVIARVRMWVNLNLWQKLKLSRDDAKPLLRLKGFPSFPLVERQANEVDWWDMVCNVKKLINEKKEDGKVFWQNLAGYKRQEALRPYLSSEEDRKKGKKFARYQLGDLLLHLEKKHGEDWGKVYDEAWERIDKKVEGLSKHIKLEEERRSEDAQSKAALTDWLRAKASFVIEGLKEADKDEFCRCELKLQKWYGDLRGKPFAIEAENSILDISGFSKQYNCAFIWQKDGVKKLNLYLIINYFKGGKLRFKKIKPEAFEANRFYTVINKKSGEIVPMEVNFNFDDPNLIILPLAFGKRQGREFIWNDLLSLETGSLKLANGRVIEKTLYNRRTRQDEPALFVALTFERREVLDSSNIKPMNLIGVDRGENIPAVIALTDPEGCPLSRFKDSLGNPTHILRIGESYKEKQRTIQAKKEVEQRRAGGYSRKYASKAKNLADDMVRNTARDLLYYAVTQDAMLIFENLSRGFGRQGKRTFMAERQYTRMEDWLTAKLAYEGLPSKTYLSKTLAQYTSKTCSNCGFTITSADYDRVLEGLKKTATGWMTTINGKELKVEGQITYYNRYKRQNVVKDLSVELDRLSEESVNNDISSWTKGRSGEALSLLKKRFSHRPVQEKFVCLNCGFETHADEQAALNIARSWLFLRSQEYKKYQTNKTTGNTDKRAFVETWQSFYRKKLKEVWKPAV

SEQ ID NO: 40857 - protein, 977 aa, Artificial Sequence
  CasX variant
QEIKRINKIRRRLVKDSNTKKAGKTGPMKTLLVRVMTPDLRERLENLRKKPENIPQPISNTSRANLNKLLTDYTEMKKAILHVYWEEFQKDPVGLMSRVAQPASKKIDQNKLKPEMDEKGNLTTAGFACSQCGQPLFVYKLEQVSEKGKAYTNYFGRCNVAEHEKLILLAQLKPEKDSDEAVTYSLGKFGQRALDFYSIHVTKESTHPVKPLAQIAGNRYASGPVGKALSDACMGTIASFLSKYQDIIIEHQKVVKGNQKRLESLRELAGKENLEYPSVTLPPQPHTKEGVDAYNEVIARVRMWVNLNLWQKLKLSRDDAKPLLRLKGFPSFPLVERQANEVDWWDMVCNVKKLINEKKEDGKVFWQNLAGYKRQEALRPYLSSEEDRKKGKKFARYQLGDLLLHLEKKHGEDWGKVYDEAWERIDKKVEGLSKHIKLEEERRSEDAQSKAALTDWLRAKASFVIEGLKEADKDEFCRCELKLQKWYGDLRGKPFAIEAENSILDISGFSKQYNCAFIWQKDGVKKLNLYLIINYFKGGKLRFKKIKPEAFEANRFYTVINKKSGEIVPMEVNFNFDDPNLIILPLAFGKRQGREFIWNDLLSLETGSLKLANGRVIEKTLYNRRTRQDEPALFVALTFERREVLDSSNIKPMNLIGVDRGENIPAVIALTDPEGCPLSRFKDSLGNPTHILRIGESYKEKQRTIQAKKEVEQRRAGGYSRKYASKAKNLADDMVRNTARDLLYYAVTQDAMLIFENLSRGFGRQGKRTFMAERQYTRMEDWLTAKLAYEGLPSKTYLSKTLAQTSKTCSNCGFTITSADYDRVLEKLKKTATGWMTTINGKELKVEGQITYYNRYKRQNVVKDLSVELDRLSEESVNNDISSWTKGRSGEALSLLKKRFSHRPVQEKFVCLNCGFETHADEQAALNIARSWLFLRSQEYKKYQTNKTTGNTDKRAFVETWQSFYRKKLKEVWKPAV

SEQ ID NO: 40858 - protein, 979 aa, Artificial Sequence
  CasX variant
QEIKRINKIRRRLVKDSNTKKAGKTGPMKTLLVRVMTPDLRERLENLRKKPENIPQPISNTSRANLNKLLTDYTEMKKAILHVYWEEFQKDPVGLMSRVAQPASKKIDQNKLKPEMDEKGNLTTAGFACSQCGQPLFVYKLEQVSEKGKAYTNYFGRCNVAEHEKLILLAQLKPEKDSDEAVTYSLGKFGQRALDFYSIHVTKESTHPVKPLAQIAGNRYASGPVGKALSDACMGTIASFLSKYQDIIIEHQKVVKGNQKRLESLRELAGKENLEYPSVTLPPQPHTKEGVDAYNEVIARVRMWVNLNLWQKLKLSRDDAKPLLRLKGFPSFPLVERQANEVDWWDMVCNVKKLINEKKEDGKVFWQNLAGYKRQEALRPYLSSEEDRKKGKKFARYQLGDLLLHLEKKHGEDWGKVYDEAWERIDKKVEGLSKHIKLEEERRSEDAQSKAALTDWLRAKASFVIEGLKEADKDEFCRCELKLQKWYGDLRGKPFAIEAENSILDISGFSKQYNCAFIWQKDGVKKLNLYLIINYFKGGKLRFKKIKPEAFEANRFYTVINKKSGEIVPMEVNFNFDDPNLIILPLAFGKRQGREFIWNDLLSLETGSLKLANGRVIEKTLYNRRTRQDEPALFVALTFERREVLDSSNIKPMNLIGVDRGENIPAVIALTDPEGCPLSRFKDSLGNPTHILRIGESYKEKQRTIQAKKEVEQRRAGGYSRKYASKAKNLADDMVRNTARDLLYYAVTQDAMLIFENLSRGFGRQGKRTFMAERQYTRMEDWLTAKLAYEGLPSKTYLSKTLAQYTISKTCSNCGFTITSADYDRVLEKLKKTATGWMTTINGKELKVEGQITYYNRYKRQNVVKDLSVELDRLSEESVNNDISSWTKGRSGEALSLLKKRFSHRPVQEKFVCLNCGFETHADEQAALNIARSWLFLRSQEYKKYQTNKTTGNTDKRAFVETWQSFYRKKLKEVWKPAV

SEQ ID NO: 40859 - protein, 978 aa, Artificial Sequence
  CasX variant
QEIKRINKIRRRLVKDSNTKKAGKTGPMKTLLVRVMTPDLRERLENLRKKPENIPQPISNTSRANLNKLLTDYTEMKKAILHVYWEEFQKDPVGLMSRVAQPASKKIDQNKLKPEMDEKGNLTTAGFACSQCGQPLFVYKLEQVSEKGKAYTNYFGRCNVAEHEKLILLAQLKPEKDSDEAVTYSLGKFGQRALDFYSIHVTKESTHPVKPLAQIAGNRYASGPVGKALSDACMGTIASFLSKYQDIIIEHQKVVKGNQKRLESLRELAGKENLEYPSVTLPPQPHTKEGVDAYNEVIARVRMWVNLNLWQKLKLSRDDAKPLLRLKGFPSFPLVERQANEVDWWDMVCNVKKLINEKKEDGKVFWQNLAGYKRQEALRPYLSSEEDRKKGKKFARYQLGDLLLHLEKKHGEDWGKVYDEAWERIDKKVEGLSKHIKLEEERRSEDAQSKAALTDWLRAKASFVIEGLKEADKDEFCRCELKLQKWYGDLRGKPFAIEAENSILDISGFSKQYNCAFIWQKDGVKKLNLYLIINYFKGGKLRFKKIKPEAFEANRFYTVINKKSGEIVPMEVNFNFDDPNLIILPLAFGKRQGREFIWNDLLSLETGSLKLANGRVIEKTLYNRRTRQDEPALFVALTFERREVLDSSNIKPMNLIGVDRGENIPAVIALTDPEGCPLSRFKDSLGNPTHILRIGESYKEKQRTIQAKKEVEQRRAGGYSRKYASKAKNLADDMVRNTARDLLYYAVTQDAMLIFENLSRGFGRQGKRTFMAERQYTRMEDWLTAKLAYEGLPSKTYLSKTLAQYTSKTKSNCGFTITSADYDRVLEKLKKTATGWMTTINGKELKVEGQITYYNRYKRQNVVKDLSVELDRLSEESVNNDISSWTKGRSGEALSLLKKRFSHRPVQEKFVCLNCGFETHADEQAALNIARSWLFLRSQEYKKYQTNKTTGNTDKRAFVETWQSFYRKKLKEVWKPAV

SEQ ID NO: 40860 - protein, 978 aa, Artificial Sequence
  CasX variant
QEIKRINKIRRRLVKDSNTKKAGKTGPMKTLLVRVMTPDLRERLENLRKKPENIPQPISNTSRANLNKLLTDYTEMKKAILHVYWEEFQKDPVGLMSRVAQPASKKIDQNKLKPEMDEKGNLTTAGFACSQCGQPLFVYKLEQVSEKGKAYTNYFGRCNVAEHEKLILLAQLKPEKDSDEAVTYSLGKFGQRALDFYSIHVTKESTHPVKPLAQIAGNRYASGPVGKALSDACMGTIASFLSKYQDIIIEHQKVVKGNQKRLESLRELAGKENLEYPSVTLPPQPHTKEGVDAYNEVIARVRMWVNLNLWQKLKLSRDDAKPLLRLKGFPSFPLVERQANEVDWWDMVCNVKKLINEKKEDGKVFWQNLAGYKRQEALRPYLSSEEDRKKGKKFARYQLGDLLLHLEKKHGEDWGKVYDEAWERIDKKVEGLSKHIKLEEERRSEDAQSKAALTDWLRAKASFVIEGLKEADKDEFCRCELKLQKWYGDLRGKPFAIEAENSILDISGFSKQYNCAFIWQKDGVKKLNLYLIINYFKGGKLRFKKIKPEAFEANRFYTVINKKSGEIVPMEVNFNFDDPNLIILPLAFGKRQGREFIWNDLLSLETGSLKLANGRVIEKTLYNRRTRQDEPALFVALTFERREVLDSSNIKPMNLIGVDRGENIPAVIALTDPEGCPLSRFKDSLGNPTHILRIGESYKEKQRTIQAKKEVEQRRAGGYSRKYASKAKNLADDMVRNTARDLLYYAVTQDAMLIFENLSRGFGRQGKRTFMAERQYTRMEDWLTAKLAYEGLPSKTYLSKQLAQYTSKTCSNCGFTITSADYDRVLEKLKKTATGWMTTINGKELKVEGQITYYNRYKRQNVVKDLSVELDRLSEESVNNDISSWTKGRSGEALSLLKKRFSHRPVQEKFVCLNCGFETHADEQAALNIARSWLFLRSQEYKKYQTNKTTGNTDKRAFVETWQSFYRKKLKEVWKPAV

SEQ ID NO: 40861 - protein, 978 aa, Artificial Sequence
  CasX variant
QEIKRINKIRRRLVKDSNTKKAGKTGPMKTLLVRVMTPDLRERLENLRKKPENIPQPISNTSRANLNKLLTDYTEMKKAILHVYWEEFQKDPVGLMSRVAQPASKKIDQNKLKPEMDEKGNLTTAGFACSQCGQPLFVYKLEQVSEKGKAYTNYFGRCNVAEHEKLILLAQLKPEKDSDEAVTYSLGKFGQRALDFYSIHVTKESTHPVKPLAQIAGNRYASGPVGKALSDACMGTIASFLSKYQDIIIEHQKVVKGNQKRLESLRELAGKENLEYPSVTLPPQPHTKEGVDAYNEVIARVRMWVNLNLWQKLKLSRDDAKPLLRLKGFPSFPLVERQANEVDWWDMVCNVKKLINEKKEDGKVFWQNLAGYKRQEALRPYLSSEEDRKKGKKFARYQLGDLLLHLEKKHGEDWGKVYDEAWERIDKKVEGLSKHIKLEEERRSEDAQSKAALTDWLRAKASFVIEGLKEADKDEFCRCELKLQKWYGDLRGKPFAIEAENSILDISGFSKQYNCAFIWQKDGVKKLNLYLIINYFKGGKLRFKKIKPEAFEANRFYTVINKKSGEIVPMEVNFNFDDPNLIILPLAFGKRQGREFIWNDLLSLETGSLKLANGRVIEKTLYNRRTRQDEPALFVALTFERREVLDSSNIKPMNLIGVDRGENIPAVIALTDPEGCPLSRFKDSLGNPTHILRIGESYKEKQRTIQAKKEVEQRRAGGYSRKYASKAKNLADDMVRNTARDLLYYAVTQDAMLIFENLSRGFGRQGKRTFMAERQYTRMEDWLTAKLAYEGLPSKTYLSKTLAQYYSKTCSNCGFTITSADYDRVLEKLKKTATGWMTTINGKELKVEGQITYYNRYKRQNVVKDLSVELDRLSEESVNNDISSWTKGRSGEALSLLKKRFSHRPVQEKFVCLNCGFETHADEQAALNIARSWLFLRSQEYKKYQTNKTTGNTDKRAFVETWQSFYRKKLKEVWKPAV

SEQ ID NO: 40862 - protein, 978 aa, Artificial Sequence
  CasX variant
QEIKRINKIRRRLVKDSNTKKAGKTGPMKTLLVRVMTPDLRERLENLRKKPENIPQPISNTSRANLNKLLTDYTEMKKAILHVYWEEFQKDPVGLMSRVAQPASKKIDQNKLKPEMDEKGNLTTAGFACSQCGQPLFVYKLEQVSEKGKAYTNYFGRCNVAEHEKLILLAQLKPEKDSDEAVTYSLGKFGQRALDFYSIHVTKESTHPVKPLAQIAGNRYASGPVGKALSDACMGTIASFLSKYQDIIIEHQKVVKGNQKRLESLRELAGKENLEYPSVTLPPQPHTKEGVDAYNEVIARVRMWVNLNLWQKLKLSRDDAKPLLRLKGFPSFPLVERQANEVDWWDMVCNVKKLINEKKEDGKVFWQNLAGYKRQEALRPYLSSEEDRKKGKKFARYQLGDLLLHLEKKHGEDWGKVYDEAWERIDKKVEGLSKHIKLEEERRSEDAQSKAALTDWLRAKASFVIEGLKEADKDEFCRCELKLQKWYGDLRGKPFAIEAENSILDISGFSKQYNCAFIWQKDGVKKLNLYLIINYFKGGKLRFKKIKPEAFEANRFYTVINKKSGEIVPMEVNFNFDDPNLIILPLAFGKRQGREFIWNDLLSLETGSLKLANGRVIEKTLYNRRTRQDEPALFVALTFERREVLDSSNIKPMNLIGVDRGENIPAVIALTDPEGCPLSRFKDSLGNPTHILRIGESYKEKQRTIQAKKEVEQRRAGGYSRKYASKAKNLADDMVRNTARDLLYYAVTQDAMLIFENLSRGFGRQGKRTFMAERQYTRMEDWLTAKLAYEGLPSKTYLSKTLAKYTSKTCSNCGFTITSADYDRVLEKLKKTATGWMTTINGKELKVEGQITYYNRYKRQNVVKDLSVELDRLSEESVNNDISSWTKGRSGEALSLLKKRFSHRPVQEKFVCLNCGFETHADEQAALNIARSWLFLRSQEYKKYQTNKTTGNTDKRAFVETWQSFYRKKLKEVWKPAV

SEQ ID NO: 40863 - protein, 978 aa, Artificial Sequence
  CasX variant
QEIKRINKIRRRLVKDSNTKKAGKTGPMKTLLVRVMTPDLRERLENLRKKPENIPQPISNTSRANLNKLLTDYTEMKKAILHVYWEEFQKDPVGLMSRVAQPASKKIDQNKLKPEMDEKGNLTTAGFACSQCGQPLFVYKLEQVSEKGKAYTNYFGRCNVAEHEKLILLAQLKPEKDSDEAVTYSLGKFGQRALDFYSIHVTKESTHPVKPLAQIAGNRYASGPVGKALSDACMGTIASFLSKYQDIIIEHQKVVKGNQKRLESLRELAGKENLEYPSVTLPPQPHTKEGVDAYNEVIARVRMWVNLNLWQKLKLSRDDAKPLLRLKGFPSFPLVERQANEVDWWDMVCNVKKLINEKKEDGKVFWQNLAGYKRQEALRPYLSSEEDRKKGKKFARYQLGDLLLHLEKKHGEDWGKVYDEAWERIDKKVEGLSKHIKLEEERRSEDAQSKAALTDWLRAKASFVIEGLKEADKDEFCRCELKLQKWYGDLRGKPFAIEAENSILDISGFSKQYNCAFIWQKDGVKKLNLYLIINYFKGGKLRFKKIKPEAFEANRFYTVINKKSGEIVPMEVNFNFDDPNLIILPLAFGKRQGREFIWNDLLSLETGSLKLANGRVIEKTLYNRRTRQDEPALFVALTFERREVLDSSNIKPMNLIGVDRGENIPAVIALTDPEGCPLSRFKDSLGNPTHILRIGESYKEKQRTIQAKKEVEQRRAGGYSRKYASKAKNLADDMVRNTARDLLYYAVTQDAMLIFENLSRGFGRQGKRTFMAERQYTRMEDWLTAKLAYEGLASKTYLSKTLAQYTSKTCSNCGFTITSADYDRVLEKLKKTATGWMTTINGKELKVEGQITYYNRYKRQNVVKDLSVELDRLSEESVNNDISSWTKGRSGEALSLLKKRFSHRPVQEKFVCLNCGFETHADEQAALNIARSWLFLRSQEYKKYQTNKTTGNTDKRAFVETWQSFYRKKLKEVWKPAV

SEQ ID NO: 40864 - protein, 979 aa, Artificial Sequence
  CasX variant
QEIKRINKIRRRLVKDSNTKKAGKTGPMKTLLVRVMTPDLRERLENLRKKPENIPQPISNTSRANLNKLLTDYTEMKKAILHVYWEEFQKDPVGLMSRVAQPASKKIDQNKLKPEMDEKGNLTTAGFACSQCGQPLFVYKLEQVSEKGKAYTNYFGRCNVAEHEKLILLAQLKPEKDSDEAVTYSLGKFGQRALDFYSIHVTKESTHPVKPLAQIAGNRYASGPVGKALSDACMGTIASFLSKYQDIIIEHQKVVKGNQKRLESLRELAGKENLEYPSVTLPPQPHTKEGVDAYNEVIARVRMWVNLNLWQKLKLSRDDAKPLLRLKGFPSFPLVERQANEVDWWDMVCNVKKLINEKKEDGKVFWQNLAGYKRQEALRPYLSSEEDRKKGKKFARYQLGDLLLHLEKKHGEDWGKVYDEAWERIDKKVEGLSKHIKLEEERRSEDAQSKAALTDWLRAKASFVIEGLKEADKDEFCRCELKLQKWYGDLRGKPFAIEAENSILDISGFSKQYNCAFIWQKDGVKKLNLYLIINYFKGGKLRFKKIKPEAFEANRFYTVINKKSGEIVPMEVNFNFDDPNLIILPLAFGKRQGREFIWNDLLSLETGSLKLANGRVIEKTLYNRRTRQDEPALFVALTFERREVLDSSNIKPMNLIGVDRGENIPAVIALTDPEGCPLSRFKDSLGNPTHILRIGESYKEKQRTIQAKKEVEQRRAGGYSRKYASKAKNLADDMVRNTARDLLYYAVTQDAMLIFENLSRGFGRQGKRTFMAERQYTRMEDWLTAKLAYEGLPSKTYLSKTLLAQYTSKTCSNCGFTITSADYDRVLEKLKKTATGWMTTINGKELKVEGQITYYNRYKRQNVVKDLSVELDRLSEESVNNDISSWTKGRSGEALSLLKKRFSHRPVQEKFVCLNCGFETHADEQAALNIARSWLFLRSQEYKKYQTNKTTGNTDKRAFVETWQSFYRKKLKEVWKPAV

SEQ ID NO: 40865 - protein, 977 aa, Artificial Sequence
  CasX variant
QEIKRINKIRRRLVKDSNTKKAGKTGPMKTLLVRVMTPDLRERLENLRKKPENIPQPISNTSRANLNKLLTDYTEMKKAILHVYWEEFQKDPVGLMSRVAQPASKKIDQNKLKPEMDEKGNLTTAGFACSQCGQPLFVYKLEQVSEKGKAYTNYFGRCNVAEHEKLILLAQLKPEKDSDEAVTYSLGKFGQRALDFYSIHVTKESTHPVKPLAQIAGNRYASGPVGKALSDACMGTIASFLSKYQDIIIEHQKVVKGNQKRLESLRELAGKENLEYPSVTLPPQPHTKEGVDAYNEVIARVRMWVNLNLWQKLKLSRDDAKPLLRLKGFPSFPLVERQANEVDWWDMVCNVKKLINEKKEDGKVFWQNLAGYKRQEALRPYLSSEEDRKKGKKFARYQLGDLLLHLEKKHGEDWGKVYDEAWERIDKKVEGLSKHIKLEEERRSEDAQSKAALTDWLRAKASFVIEGLKEADKDEFCRCELKLQKWYGDLRGKPFAIEAENSILDISGFSKQYNCAFIWQKDGVKKLNLYLIINYFKGGKLRFKKIKPEAFEANRFYTVINKKSGEIVPMEVNFNFDDPNLIILPLAFGKRQGREFIWNDLLSLETGSLKLANGRVIEKTLYNRRTRQDEPALFVALTFERREVLDSSNIKPMNLIGVDRGENIPAVIALTDPEGCPLSRFKDSLGNPTHILRIGESYKEKQRTIQAKKEVEQRRAGGYSRKYASKAKNLADDMVRNTARDLLYYAVTQDAMLIFENLSRGFGRQGKRTFMAERQYTRMEDWLTAKLAYEGLPSKTYLSKTAQYTSKTCSNCGFTITSADYDRVLEKLKKTATGWMTTINGKELKVEGQITYYNRYKRQNVVKDLSVELDRLSEESVNNDISSWTKGRSGEALSLLKKRFSHRPVQEKFVCLNCGFETHADEQAALNIARSWLFLRSQEYKKYQTNKTTGNTDKRAFVETWQSFYRKKLKEVWKPAV

SEQ ID NO: 40866 - protein, 979 aa, Artificial Sequence
  CasX variant
QEIKRINKIRRRLVKDSNTKKAGKTGPMKTLLVRVMTPDLRERLENLRKKPENIPQPISNTSRANLNKLLTDYTEMKKAILHVYWEEFQKDPVGLMSRVAQPASKKIDQNKLKPEMDEKGNLTTAGFACSQCGQPLFVYKLEQVSEKGKAYTNYFGRCNVAEHEKLILLAQLKPEKDSDEAVTYSLGKFGQRALDFYSIHVTKESTHPVKPLAQIAGNRYASGPVGKALSDACMGTIASFLSKYQDIIIEHQKVVKGNQKRLESLRELAGKENLEYPSVTLPPQPHTKEGVDAYNEVIARVRMWVNLNLWQKLKLSRDDAKPLLRLKGFPSFPLVERQANEVDWWDMVCNVKKLINEKKEDGKVFWQNLAGYKRQEALRPYLSSEEDRKKGKKFARYQLGDLLLHLEKKHGEDWGKVYDEAWERIDKKVEGLSKHIKLEEERRSEDAQSKAALTDWLRAKASFVIEGLKEADKDEFCRCELKLQKWYGDLRGKPFAIEAENSILDISGFSKQYNCAFIWQKDGVKKLNLYLIINYFKGGKLRFKKIKPEAFEANRFYTVINKKSGEIVPMEVNFNFDDPNLIILPLAFGKRQGREFIWNDLLSLETGSLKLANGRVIEKTLYNRRTRQDEPALFVALTFERREVLDSSNIKPMNLIGVDRGENIPAVIALTDPEGCPLSRFKDSLGNPTHILRIGESYKEKQRTIQAKKEVEQRRAGGYSRKYASKAKNLADDMVRNTARDLLYYAVTQDAMLIFENLSRGFGRQGKRTFMAERQYTRMEDWLTAKLAYEGLPSKTYLSKTLAQYTSKTCSNCGFTWITSADYDRVLEKLKKTATGWMTTINGKELKVEGQITYYNRYKRQNVVKDLSVELDRLSEESVNNDISSWTKGRSGEALSLLKKRFSHRPVQEKFVCLNCGFETHADEQAALNIARSWLFLRSQEYKKYQTNKTTGNTDKRAFVETWQSFYRKKLKEVWKPAV

SEQ ID NO: 40867 - protein, 979 aa, Artificial Sequence
  CasX variant
QEIKRINKIRRRLVKDSNTKKAGKTGPMKTLLVRVMTPDLRERLENLRKKPENIPQPISNTSRANLNKLLTDYTEMKKAILHVYWEEFQKDPVGLMSRVAQPASKKIDQNKLKPEMDEKGNLTTAGFACSQCGQPLFVYKLEQVSEKGKAYTNYFGRCNVAEHEKLILLAQLKPEKDSDEAVTYSLGKFGQRALDFYSIHVTKESTHPVKPLAQIAGNRYASGPVGKALSDACMGTIASFLSKYQDIIIEHQKVVKGNQKRLESLRELAGKENLEYPSVTLPPQPHTKEGVDAYNEVIARVRMWVNLNLWQKLKLSRDDAKPLLRLKGFPSFPLVERQANEVDWWDMVCNVKKLINEKKEDGKVFWQNLAGYKRQEALRPYLSSEEDRKKGKKFARYQLGDLLLHLEKKHGEDWGKVYDEAWERIDKKVEGLSKHIKLEEERRSEDAQSKAALTDWLRAKASFVIEGLKEADKDEFCRCELKLQKWYGDLRGKPFAIEAENSILDISGFSKQYNCAFIWQKDGVKKLNLYLIINYFKGGKLRFKKIKPEAFEANRFYTVINKKSGEIVPMEVNFNFDDPNLIILPLAFGKRQGREFIWNDLLSLETGSLKLANGRVIEKTLYNRRTRQDEPALFVALTFERREVLDSSNIKPMNLIGVDRGENIPAVIALTDPEGCPLSRFKDSLGNPTHILRIGESYKEKQRTIQAKKEVEQRRAGGYSRKYASKAKNLADDMVRNTARDLLYYAVTQDAMLIFENLSRGFGRQGKRTFMAERQYTRMEDWLTAKLAYEGLPSKTYLSKHTLAQYTSKTCSNCGFTITSADYDRVLEKLKKTATGWMTTINGKELKVEGQITYYNRYKRQNVVKDLSVELDRLSEESVNNDISSWTKGRSGEALSLLKKRFSHRPVQEKFVCLNCGFETHADEQAALNIARSWLFLRSQEYKKYQTNKTTGNTDKRAFVETWQSFYRKKLKEVWKPAV

SEQ ID NO: 40868 - protein, 978 aa, Artificial Sequence
  CasX variant
QEIKRINKIRRRLVKDSNTKKAGKTGPMKTLLVRVMTPDLRERLENLRKKPENIPQPISNTSRANLNKLLTDYTEMKKAILHVYWEEFQKDPVGLMSRVAQPASKKIDQNKLKPEMDEKGNLTTAGFACSQCGQPLFVYKLEQVSEKGKAYTNYFGRCNVAEHEKLILLAQLKPEKDSDEAVTYSLGKFGQRALDFYSIHVTKESTHPVKPLAQIAGNRYASGPVGKALSDACMGTIASFLSKYQDIIIEHQKVVKGNQKRLESLRELAGKENLEYPSVTLPPQPHTKEGVDAYNEVIARVRMWVNLNLWQKLKLSRDDAKPLLRLKGFPSFPLVERQANEVDWWDMVCNVKKLINEKKEDGKVFWQNLAGYKRQEALRPYLSSEEDRKKGKKFARYQLGDLLLHLEKKHGEDWGKVYDEAWERIDKKVEGLSKHIKLEEERRSEDAQSKAALTDWLRAKASFVIEGLKEADKDEFCRCELKLQKWYGDLRGKPFAIEAENSILDISGFSKQYNCAFIWQKDGVKKLNLYLIINYFKGGKLRFKKIKPEAFEANRFYTVINKKSGEIVPMEVNFNFDDPNLIILPLAFGKRQGREFIWNDLLSLETGSLKLANGRVIEKTLYNRRTRQDEPALFVALTFERREVLDSSNIKPMNLIGVDRGENIPAVIALTDPEGCPLSRFKDSLGNPTHILRIGESYKEKQRTIQAKKEVEQRRAGGYSRKYASKAKNLADDMVRNTARDLLYYAVTQDAMLIFENLSRGFGRQGKRTFMAERQYTRMEDWLTAKLAYEGLPSKTYLSKTLAQYTSKPCSNCGFTITSADYDRVLEKLKKTATGWMTTINGKELKVEGQITYYNRYKRQNVVKDLSVELDRLSEESVNNDISSWTKGRSGEALSLLKKRFSHRPVQEKFVCLNCGFETHADEQAALNIARSWLFLRSQEYKKYQTNKTTGNTDKRAFVETWQSFYRKKLKEVWKPAV

SEQ ID NO: 40869 - protein, 979 aa, Artificial Sequence
  CasX variant
QEIKRINKIRRRLVKDSNTKKAGKTGPMKTLLVRVMTPDLRERLENLRKKPENIPQPISNTSRANLNKLLTDYTEMKKAILHVYWEEFQKDPVGLMSRVAQPASKKIDQNKLKPEMDEKGNLTTAGFACSQCGQPLFVYKLEQVSEKGKAYTNYFGRCNVAEHEKLILLAQLKPEKDSDEAVTYSLGKFGQRALDFYSIHVTKESTHPVKPLAQIAGNRYASGPVGKALSDACMGTIASFLSKYQDIIIEHQKVVKGNQKRLESLRELAGKENLEYPSVTLPPQPHTKEGVDAYNEVIARVRMWVNLNLWQKLKLSRDDAKPLLRLKGFPSFPLVERQANEVDWWDMVCNVKKLINEKKEDGKVFWQNLAGYKRQEALRPYLSSEEDRKKGKKFARYQLGDLLLHLEKKHGEDWGKVYDEAWERIDKKVEGLSKHIKLEEERRSEDAQSKAALTDWLRAKASFVIEGLKEADKDEFCRCELKLQKWYGDLRGKPFAIEAENSILDISGFSKQYNCAFIWQKDGVKKLNLYLIINYFKGGKLRFKKIKPEAFEANRFYTVINKKSGEIVPMEVNFNFDDPNLIILPLAFGKRQGREFIWNDLLSLETGSLKLANGRVIEKTLYNRRTRQDEPALFVALTFERREVLDSSNIKPMNLIGVDRGENIPAVIALTDPEGCPLSRFKDSLGNPTHILRIGESYKEKQRTIQAKKEVEQRRAGGYSRKYASKAKNLADDMVRNTARDLLYYAVTQDAMLIFENLSRGFGRQGKRTFMAERQYTRMEDWLTAKLAYEGLPSKTYLSKTLAAQYTSKTCSNCGFTITSADYDRVLEKLKKTATGWMTTINGKELKVEGQITYYNRYKRQNVVKDLSVELDRLSEESVNNDISSWTKGRSGEALSLLKKRFSHRPVQEKFVCLNCGFETHADEQAALNIARSWLFLRSQEYKKYQTNKTTGNTDKRAFVETWQSFYRKKLKEVWKPAV

SEQ ID NO: 40870 - protein, 979 aa, Artificial Sequence
  CasX variant
QEIKRINKIRRRLVKDSNTKKAGKTGPMKTLLVRVMTPDLRERLENLRKKPENIPQPISNTSRANLNKLLTDYTEMKKAILHVYWEEFQKDPVGLMSRVAQPASKKIDQNKLKPEMDEKGNLTTAGFACSQCGQPLFVYKLEQVSEKGKAYTNYFGRCNVAEHEKLILLAQLKPEKDSDEAVTYSLGKFGQRALDFYSIHVTKESTHPVKPLAQIAGNRYASGPVGKALSDACMGTIASFLSKYQDIIIEHQKVVKGNQKRLESLRELAGKENLEYPSVTLPPQPHTKEGVDAYNEVIARVRMWVNLNLWQKLKLSRDDAKPLLRLKGFPSFPLVERQANEVDWWDMVCNVKKLINEKKEDGKVFWQNLAGYKRQEALRPYLSSEEDRKKGKKFARYQLGDLLLHLEKKHGEDWGKVYDEAWERIDKKVEGLSKHIKLEEERRSEDAQSKAALTDWLRAKASFVIEGLKEADKDEFCRCELKLQKWYGDLRGKPFAIEAENSILDISGFSKQYNCAFIWQKDGVKKLNLYLIINYFKGGKLRFKKIKPEAFEANRFYTVINKKSGEIVPMEVNFNFDDPNLIILPLAFGKRQGREFIWNDLLSLETGSLKLANGRVIEKTLYNRRTRQDEPALFVALTFERREVLDSSNIKPMNLIGVDRGENIPAVIALTDPEGCPLSRFKDSLGNPTHILRIGESYKEKQRTIQAKKEVEQRRAGGYSRKYASKAKNLADDMVRNTARDLLYYAVTQDAMLIFENLSRGFGRQGKRTFMAERQYTRMEDWLTAKLAYEGLPSKTYLSKTLAQYTSKTCSNCGGFTITSADYDRVLEKLKKTATGWMTTINGKELKVEGQITYYNRYKRQNVVKDLSVELDRLSEESVNNDISSWTKGRSGEALSLLKKRFSHRPVQEKFVCLNCGFETHADEQAALNIARSWLFLRSQEYKKYQTNKTTGNTDKRAFVETWQSFYRKKLKEVWKPAV

SEQ ID NO: 40871 - protein, 979 aa, Artificial Sequence
  CasX variant
QEIKRINKIRRRLVKDSNTKKAGKTGPMKTLLVRVMTPDLRERLENLRKKPENIPQPISNTSRANLNKLLTDYTEMKKAILHVYWEEFQKDPVGLMSRVAQPASKKIDQNKLKPEMDEKGNLTTAGFACSQCGQPLFVYKLEQVSEKGKAYTNYFGRCNVAEHEKLILLAQLKPEKDSDEAVTYSLGKFGQRALDFYSIHVTKESTHPVKPLAQIAGNRYASGPVGKALSDACMGTIASFLSKYQDIIIEHQKVVKGNQKRLESLRELAGKENLEYPSVTLPPQPHTKEGVDAYNEVIARVRMWVNLNLWQKLKLSRDDAKPLLRLKGFPSFPLVERQANEVDWWDMVCNVKKLINEKKEDGKVFWQNLAGYKRQEALRPYLSSEEDRKKGKKFARYQLGDLLLHLEKKHGEDWGKVYDEAWERIDKKVEGLSKHIKLEEERRSEDAQSKAALTDWLRAKASFVIEGLKEADKDEFCRCELKLQKWYGDLRGKPFAIEAENSILDISGFSKQYNCAFIWQKDGVKKLNLYLIINYFKGGKLRFKKIKPEAFEANRFYTVINKKSGEIVPMEVNFNFDDPNLIILPLAFGKRQGREFIWNDLLSLETGSLKLANGRVIEKTLYNRRTRQDEPALFVALTFERREVLDSSNIKPMNLIGVDRGENIPAVIALTDPEGCPLSRFKDSLGNPTHILRIGESYKEKQRTIQAKKEVEQRRAGGYSRKYASKAKNLADDMVRNTARDLLYYAVTQDAMLIFENLSRGFGRQGKRTFMAERQYTRMEDWLTAKLAYEGLPSKTYLSKTLFAQYTSKTCSNCGFTITSADYDRVLEKLKKTATGWMTTINGKELKVEGQITYYNRYKRQNVVKDLSVELDRLSEESVNNDISSWTKGRSGEALSLLKKRFSHRPVQEKFVCLNCGFETHADEQAALNIARSWLFLRSQEYKKYQTNKTTGNTDKRAFVETWQSFYRKKLKEVWKPAV

SEQ ID NO: 40872 - protein, 979 aa, Artificial Sequence
  CasX variant
QEIKRINKIRRRLVKDSNTKKAGKTGPMKTLLVRVMTPDLRERLENLRKKPENIPQPISNTSRANLNKLLTDYTEMKKAILHVYWEEFQKDPVGLMSRVAQPASKKIDQNKLKPEMDEKGNLTTAGFACSQCGQPLFVYKLEQVSEKGKAYTNYFGRCNVAEHEKLILLAQLKPEKDSDEAVTYSLGKFGQRALDFYSIHVTKESTHPVKPLAQIAGNRYASGPVGKALSDACMGTIASFLSKYQDIIIEHQKVVKGNQKRLESLRELAGKENLEYPSVTLPPQPHTKEGVDAYNEVIARVRMWVNLNLWQKLKLSRDDAKPLLRLKGFPSFPLVERQANEVDWWDMVCNVKKLINEKKEDGKVFWQNLAGYKRQEALRPYLSSEEDRKKGKKFARYQLGDLLLHLEKKHGEDWGKVYDEAWERIDKKVEGLSKHIKLEEERRSEDAQSKAALTDWLRAKASFVIEGLKEADKDEFCRCELKLQKWYGDLRGKPFAIEAENSILDISGFSKQYNCAFIWQKDGVKKLNLYLIINYFKGGKLRFKKIKPEAFEANRFYTVINKKSGEIVPMEVNFNFDDPNLIILPLAFGKRQGREFIWNDLLSLETGSLKLANGRVIEKTLYNRRTRQDEPALFVALTFERREVLDSSNIKPMNLIGVDRGENIPAVIALTDPEGCPLSRFKDSLGNPTHILRIGESYKEKQRTIQAKKEVEQRRAGGYSRKYASKAKNLADDMVRNTARDLLYYAVTQDAMLIFENLSRGFGRQGKRTFMAERQYTRMEDWLTAKLAYEGLPSKTYLSKTLAQYTSKNTCSNCGFTITSADYDRVLEKLKKTATGWMTTINGKELKVEGQITYYNRYKRQNVVKDLSVELDRLSEESVNNDISSWTKGRSGEALSLLKKRFSHRPVQEKFVCLNCGFETHADEQAALNIARSWLFLRSQEYKKYQTNKTTGNTDKRAFVETWQSFYRKKLKEVWKPAV

SEQ ID NO: 40873 - protein, 978 aa, Artificial Sequence
  CasX variant
QEIKRINKIRRRLVKDSNTKKAGKTGPMKTLLVRVMTPDLRERLENLRKKPENIPQPISNTSRANLNKLLTDYTEMKKAILHVYWEEFQKDPVGLMSRVAQPASKKIDQNKLKPEMDEKGNLTTAGFACSQCGQPLFVYKLEQVSEKGKAYTNYFGRCNVAEHEKLILLAQLKPEKDSDEAVTYSLGKFGQRALDFYSIHVTKESTHPVKPLAQIAGNRYASGPVGKALSDACMGTIASFLSKYQDIIIEHQKVVKGNQKRLESLRELAGKENLEYPSVTLPPQPHTKEGVDAYNEVIARVRMWVNLNLWQKLKLSRDDAKPLLRLKGFPSFPLVERQANEVDWWDMVCNVKKLINEKKEDGKVFWQNLAGYKRQEALRPYLSSEEDRKKGKKFARYQLGDLLLHLEKKHGEDWGKVYDEAWERIDKKVEGLSKHIKLEEERRSEDAQSKAALTDWLRAKASFVIEGLKEADKDEFCRCELKLQKWYGDLRGKPFAIEAENSILDISGFSKQYNCAFIWQKDGVKKLNLYLIINYFKGGKLRFKKIKPEAFEANRFYTVINKKSGEIVPMEVNFNFDDPNLIILPLAFGKRQGREFIWNDLLSLETGSLKLANGRVIEKTLYNRRTRQDEPALFVALTFERREVLDSSNIKPMNLIGVDRGENIPAVIALTDPEGCPLSRFKDSLGNPTHILRIGESYKEKQRTIQAKKEVEQRRAGGYSRKYASKAKNLADDMVRNTARDLLYYAVTQDAMLIFENLSRGFGRQGKRTFMAERQYTRMEDWLTAKLAYEGLPSKTYLSKTLAQYTSKTCSNCGPTITSADYDRVLEKLKKTATGWMTTINGKELKVEGQITYYNRYKRQNVVKDLSVELDRLSEESVNNDISSWTKGRSGEALSLLKKRFSHRPVQEKFVCLNCGFETHADEQAALNIARSWLFLRSQEYKKYQTNKTTGNTDKRAFVETWQSFYRKKLKEVWKPAV

SEQ ID NO: 40874 - protein, 979 aa, Artificial Sequence
  CasX variant
QEIKRINKIRRRLVKDSNTKKAGKTGPMKTLLVRVMTPDLRERLENLRKKPENIPQPISNTSRANLNKLLTDYTEMKKAILHVYWEEFQKDPVGLMSRVAQPASKKIDQNKLKPEMDEKGNLTTAGFACSQCGQPLFVYKLEQVSEKGKAYTNYFGRCNVAEHEKLILLAQLKPEKDSDEAVTYSLGKFGQRALDFYSIHVTKESTHPVKPLAQIAGNRYASGPVGKALSDACMGTIASFLSKYQDIIIEHQKVVKGNQKRLESLRELAGKENLEYPSVTLPPQPHTKEGVDAYNEVIARVRMWVNLNLWQKLKLSRDDAKPLLRLKGFPSFPLVERQANEVDWWDMVCNVKKLINEKKEDGKVFWQNLAGYKRQEALRPYLSSEEDRKKGKKFARYQLGDLLLHLEKKHGEDWGKVYDEAWERIDKKVEGLSKHIKLEEERRSEDAQSKAALTDWLRAKASFVIEGLKEADKDEFCRCELKLQKWYGDLRGKPFAIEAENSILDISGFSKQYNCAFIWQKDGVKKLNLYLIINYFKGGKLRFKKIKPEAFEANRFYTVINKKSGEIVPMEVNFNFDDPNLIILPLAFGKRQGREFIWNDLLSLETGSLKLANGRVIEKTLYNRRTRQDEPALFVALTFERREVLDSSNIKPMNLIGVDRGENIPAVIALTDPEGCPLSRFKDSLGNPTHILRIGESYKEKQRTIQAKKEVEQRRAGGYSRKYASKAKNLADDMVRNTARDLLYYAVTQDAMLIFENLSRGFGRQGKRTFMAERQYTRMEDWLTAKLAYEGLPSKTYLSKTWLAQYTSKTCSNCGFTITSADYDRVLEKLKKTATGWMTTINGKELKVEGQITYYNRYKRQNVVKDLSVELDRLSEESVNNDISSWTKGRSGEALSLLKKRFSHRPVQEKFVCLNCGFETHADEQAALNIARSWLFLRSQEYKKYQTNKTTGNTDKRAFVETWQSFYRKKLKEVWKPAV

SEQ ID NO: 40875 - protein, 978 aa, Artificial Sequence
  CasX variant
QEIKRINKIRRRLVKDSNTKKAGKTGPMKTLLVRVMTPDLRERLENLRKKPENIPQPISNTSRANLNKLLTDYTEMKKAILHVYWEEFQKDPVGLMSRVAQPASKKIDQNKLKPEMDEKGNLTTAGFACSQCGQPLFVYKLEQVSEKGKAYTNYFGRCNVAEHEKLILLAQLKPEKDSDEAVTYSLGKFGQRALDFYSIHVTKESTHPVKPLAQIAGNRYASGPVGKALSDACMGTIASFLSKYQDIIIEHQKVVKGNQKRLESLRELAGKENLEYPSVTLPPQPHTKEGVDAYNEVIARVRMWVNLNLWQKLKLSRDDAKPLLRLKGFPSFPLVERQANEVDWWDMVCNVKKLINEKKEDGKVFWQNLAGYKRQEALRPYLSSEEDRKKGKKFARYQLGDLLLHLEKKHGEDWGKVYDEAWERIDKKVEGLSKHIKLEEERRSEDAQSKAALTDWLRAKASFVIEGLKEADKDEFCRCELKLQKWYGDLRGKPFAIEAENSILDISGFSKQYNCAFIWQKDGVKKLNLYLIINYFKGGKLRFKKIKPEAFEANRFYTVINKKSGEIVPMEVNFNFDDPNLIILPLAFGKRQGREFIWNDLLSLETGSLKLANGRVIEKTLYNRRTRQDEPALFVALTFERREVLDSSNIKPMNLIGVDRGENIPAVIALTDPEGCPLSRFKDSLGNPTHILRIGESYKEKQRTIQAKKEVEQRRAGGYSRKYASKAKNLADDMVRNTARDLLYYAVTQDAMLIFENLSRGFGRQGKRTFMAERQYTRMEDWLTAKLAYEGLPSKTYLSKTLAQYTSKTMSNCGFTITSADYDRVLEKLKKTATGWMTTINGKELKVEGQITYYNRYKRQNVVKDLSVELDRLSEESVNNDISSWTKGRSGEALSLLKKRFSHRPVQEKFVCLNCGFETHADEQAALNIARSWLFLRSQEYKKYQTNKTTGNTDKRAFVETWQSFYRKKLKEVWKPAV

SEQ ID NO: 40876 - protein, 977 aa, Artificial Sequence
  CasX variant
QEIKRINKIRRRLVKDSNTKKAGKTGPMKTLLVRVMTPDLRERLENLRKKPENIPQPISNTSRANLNKLLTDYTEMKKAILHVYWEEFQKDPVGLMSRVAQPASKKIDQNKLKPEMDEKGNLTTAGFACSQCGQPLFVYKLEQVSEKGKAYTNYFGRCNVAEHEKLILLAQLKPEKDSDEAVTYSLGKFGQRALDFYSIHVTKESTHPVKPLAQIAGNRYASGPVGKALSDACMGTIASFLSKYQDIIIEHQKVVKGNQKRLESLRELAGKENLEYPSVTLPPQPHTKEGVDAYNEVIARVRMWVNLNLWQKLKLSRDDAKPLLRLKGFPSFPLVERQANEVDWWDMVCNVKKLINEKKEDGKVFWQNLAGYKRQEALRPYLSSEEDRKKGKKFARYQLGDLLLHLEKKHGEDWGKVYDEAWERIDKKVEGLSKHIKLEEERRSEDAQSKAALTDWLRAKASFVIEGLKEADKDEFCRCELKLQKWYGDLRGKPFAIEAENSILDISGFSKQYNCAFIWQKDGVKKLNLYLIINYFKGGKLRFKKIKPEAFEANRFYTVINKKSGEIVPMEVNFNFDDPNLIILPLAFGKRQGREFIWNDLLSLETGSLKLANGRVIEKTLYNRRTRQDEPALFVALTFERREVLDSSNIKPMNLIGVDRGENIPAVIALTDPEGCPLSRFKDSLGNPTHILRIGESYKEKQRTIQAKKEVEQRRAGGYSRKYASKAKNLADDMVRNTARDLLYYAVTQDAMLIFENLSRGFGRQGKRTFMAERQYTRMEDWLTAKLAYEGLPSKTYLSKTLAQYTSKTCSCGFTITSADYDRVLEKLKKTATGWMTTINGKELKVEGQITYYNRYKRQNVVKDLSVELDRLSEESVNNDISSWTKGRSGEALSLLKKRFSHRPVQEKFVCLNCGFETHADEQAALNIARSWLFLRSQEYKKYQTNKTTGNTDKRAFVETWQSFYRKKLKEVWKPAV

SEQ ID NO: 40877 - protein, 979 aa, Artificial Sequence
  CasX variant
QEIKRINKIRRRLVKDSNTKKAGKTGPMKTLLVRVMTPDLRERLENLRKKPENIPQPISNTSRANLNKLLTDYTEMKKAILHVYWEEFQKDPVGLMSRVAQPASKKIDQNKLKPEMDEKGNLTTAGFACSQCGQPLFVYKLEQVSEKGKAYTNYFGRCNVAEHEKLILLAQLKPEKDSDEAVTYSLGKFGQRALDFYSIHVTKESTHPVKPLAQIAGNRYASGPVGKALSDACMGTIASFLSKYQDIIIEHQKVVKGNQKRLESLRELAGKENLEYPSVTLPPQPHTKEGVDAYNEVIARVRMWVNLNLWQKLKLSRDDAKPLLRLKGFPSFPLVERQANEVDWWDMVCNVKKLINEKKEDGKVFWQNLAGYKRQEALRPYLSSEEDRKKGKKFARYQLGDLLLHLEKKHGEDWGKVYDEAWERIDKKVEGLSKHIKLEEERRSEDAQSKAALTDWLRAKASFVIEGLKEADKDEFCRCELKLQKWYGDLRGKPFAIEAENSILDISGFSKQYNCAFIWQKDGVKKLNLYLIINYFKGGKLRFKKIKPEAFEANRFYTVINKKSGEIVPMEVNFNFDDPNLIILPLAFGKRQGREFIWNDLLSLETGSLKLANGRVIEKTLYNRRTRQDEPALFVALTFERREVLDSSNIKPMNLIGVDRGENIPAVIALTDPEGCPLSRFKDSLGNPTHILRIGESYKEKQRTIQAKKEVEQRRAGGYSRKYASKAKNLADDMVRNTARDLLYYAVTQDAMLIFENLSRGFGRQGKRTFMAERQYTRMEDWLTAKLAYEGLPSKTYLSKTLAQYTSKTCSVNCGFTITSADYDRVLEKLKKTATGWMTTINGKELKVEGQITYYNRYKRQNVVKDLSVELDRLSEESVNNDISSWTKGRSGEALSLLKKRFSHRPVQEKFVCLNCGFETHADEQAALNIARSWLFLRSQEYKKYQTNKTTGNTDKRAFVETWQSFYRKKLKEVWKPAV

SEQ ID NO: 40878 - protein, 978 aa, Artificial Sequence
  CasX variant
QEIKRINKIRRRLVKDSNTKKAGKTGPMKTLLVRVMTPDLRERLENLRKKPENIPQPISNTSRANLNKLLTDYTEMKKAILHVYWEEFQKDPVGLMSRVAQPASKKIDQNKLKPEMDEKGNLTTAGFACSQCGQPLFVYKLEQVSEKGKAYTNYFGRCNVAEHEKLILLAQLKPEKDSDEAVTYSLGKFGQRALDFYSIHVTKESTHPVKPLAQIAGNRYASGPVGKALSDACMGTIASFLSKYQDIIIEHQKVVKGNQKRLESLRELAGKENLEYPSVTLPPQPHTKEGVDAYNEVIARVRMWVNLNLWQKLKLSRDDAKPLLRLKGFPSFPLVERQANEVDWWDMVCNVKKLINEKKEDGKVFWQNLAGYKRQEALRPYLSSEEDRKKGKKFARYQLGDLLLHLEKKHGEDWGKVYDEAWERIDKKVEGLSKHIKLEEERRSEDAQSKAALTDWLRAKASFVIEGLKEADKDEFCRCELKLQKWYGDLRGKPFAIEAENSILDISGFSKQYNCAFIWQKDGVKKLNLYLIINYFKGGKLRFKKIKPEAFEANRFYTVINKKSGEIVPMEVNFNFDDPNLIILPLAFGKRQGREFIWNDLLSLETGSLKLANGRVIEKTLYNRRTRQDEPALFVALTFERREVLDSSNIKPMNLIGVDRGENIPAVIALTDPEGCPLSRFKDSLGNPTHILRIGESYKEKQRTIQAKKEVEQRRAGGYSRKYASKAKNLADDMVRNTARDLLYYAVTQDAMLIFENLSRGFGRQGKRTFMAERQYTRMEDWLTAKLAYEGLPSKTYLSKTLAQYTPKTCSNCGFTITSADYDRVLEKLKKTATGWMTTINGKELKVEGQITYYNRYKRQNVVKDLSVELDRLSEESVNNDISSWTKGRSGEALSLLKKRFSHRPVQEKFVCLNCGFETHADEQAALNIARSWLFLRSQEYKKYQTNKTTGNTDKRAFVETWQSFYRKKLKEVWKPAV

SEQ ID NO: 40879 - protein, 979 aa, Artificial Sequence
  CasX variant
QEIKRINKIRRRLVKDSNTKKAGKTGPMKTLLVRVMTPDLRERLENLRKKPENIPQPISNTSRANLNKLLTDYTEMKKAILHVYWEEFQKDPVGLMSRVAQPASKKIDQNKLKPEMDEKGNLTTAGFACSQCGQPLFVYKLEQVSEKGKAYTNYFGRCNVAEHEKLILLAQLKPEKDSDEAVTYSLGKFGQRALDFYSIHVTKESTHPVKPLAQIAGNRYASGPVGKALSDACMGTIASFLSKYQDIIIEHQKVVKGNQKRLESLRELAGKENLEYPSVTLPPQPHTKEGVDAYNEVIARVRMWVNLNLWQKLKLSRDDAKPLLRLKGFPSFPLVERQANEVDWWDMVCNVKKLINEKKEDGKVFWQNLAGYKRQEALRPYLSSEEDRKKGKKFARYQLGDLLLHLEKKHGEDWGKVYDEAWERIDKKVEGLSKHIKLEEERRSEDAQSKAALTDWLRAKASFVIEGLKEADKDEFCRCELKLQKWYGDLRGKPFAIEAENSILDISGFSKQYNCAFIWQKDGVKKLNLYLIINYFKGGKLRFKKIKPEAFEANRFYTVINKKSGEIVPMEVNFNFDDPNLIILPLAFGKRQGREFIWNDLLSLETGSLKLANGRVIEKTLYNRRTRQDEPALFVALTFERREVLDSSNIKPMNLIGVDRGENIPAVIALTDPEGCPLSRFKDSLGNPTHILRIGESYKEKQRTIQAKKEVEQRRAGGYSRKYASKAKNLADDMVRNTARDLLYYAVTQDAMLIFENLSRGFGRQGKRTFMAERQYTRMEDWPLTAKLAYEGLPSKTYLSKTLAQYTSKTCSNCGFTITSADYDRVLEKLKKTATGWMTTINGKELKVEGQITYYNRYKRQNVVKDLSVELDRLSEESVNNDISSWTKGRSGEALSLLKKRFSHRPVQEKFVCLNCGFETHADEQAALNIARSWLFLRSQEYKKYQTNKTTGNTDKRAFVETWQSFYRKKLKEVWKPAV

SEQ ID NO: 40880 - protein, 979 aa, Artificial Sequence
  CasX variant
QEIKRINKIRRRLVKDSNTKKAGKTGPMKTLLVRVMTPDLRERLENLRKKPENIPQPISNTSRANLNKLLTDYTEMKKAILHVYWEEFQKDPVGLMSRVAQPASKKIDQNKLKPEMDEKGNLTTAGFACSQCGQPLFVYKLEQVSEKGKAYTNYFGRCNVAEHEKLILLAQLKPEKDSDEAVTYSLGKFGQRALDFYSIHVTKESTHPVKPLAQIAGNRYASGPVGKALSDACMGTIASFLSKYQDIIIEHQKVVKGNQKRLESLRELAGKENLEYPSVTLPPQPHTKEGVDAYNEVIARVRMWVNLNLWQKLKLSRDDAKPLLRLKGFPSFPLVERQANEVDWWDMVCNVKKLINEKKEDGKVFWQNLAGYKRQEALRPYLSSEEDRKKGKKFARYQLGDLLLHLEKKHGEDWGKVYDEAWERIDKKVEGLSKHIKLEEERRSEDAQSKAALTDWLRAKASFVIEGLKEADKDEFCRCELKLQKWYGDLRGKPFAIEAENSILDISGFSKQYNCAFIWQKDGVKKLNLYLIINYFKGGKLRFKKIKPEAFEANRFYTVINKKSGEIVPMEVNFNFDDPNLIILPLAFGKRQGREFIWNDLLSLETGSLKLANGRVIEKTLYNRRTRQDEPALFVALTFERREVLDSSNIKPMNLIGVDRGENIPAVIALTDPEGCPLSRFKDSLGNPTHILRIGESYKEKQRTIQAKKEVEQRRAGGYSRKYASKAKNLADDMVRNTARDLLYYAVTQDAMLIFENLSRGFGRQGKRTFMAERQYTRMEDWLTAKLAYEGLPSKTYLSKTLAQYTSKTCMSNCGFTITSADYDRVLEKLKKTATGWMTTINGKELKVEGQITYYNRYKRQNVVKDLSVELDRLSEESVNNDISSWTKGRSGEALSLLKKRFSHRPVQEKFVCLNCGFETHADEQAALNIARSWLFLRSQEYKKYQTNKTTGNTDKRAFVETWQSFYRKKLKEVWKPAV

SEQ ID NO: 40881 - protein, 979 aa, Artificial Sequence
  CasX variant
QEIKRINKIRRRLVKDSNTKKAGKTGPMKTLLVRVMTPDLRERLENLRKKPENIPQPISNTSRANLNKLLTDYTEMKKAILHVYWEEFQKDPVGLMSRVAQPASKKIDQNKLKPEMDEKGNLTTAGFACSQCGQPLFVYKLEQVSEKGKAYTNYFGRCNVAEHEKLILLAQLKPEKDSDEAVTYSLGKFGQRALDFYSIHVTKESTHPVKPLAQIAGNRYASGPVGKALSDACMGTIASFLSKYQDIIIEHQKVVKGNQKRLESLRELAGKENLEYPSVTLPPQPHTKEGVDAYNEVIARVRMWVNLNLWQKLKLSRDDAKPLLRLKGFPSFPLVERQANEVDWWDMVCNVKKLINEKKEDGKVFWQNLAGYKRQEALRPYLSSEEDRKKGKKFARYQLGDLLLHLEKKHGEDWGKVYDEAWERIDKKVEGLSKHIKLEEERRSEDAQSKAALTDWLRAKASFVIEGLKEADKDEFCRCELKLQKWYGDLRGKPFAIEAENSILDISGFSKQYNCAFIWQKDGVKKLNLYLIINYFKGGKLRFKKIKPEAFEANRFYTVINKKSGEIVPMEVNFNFDDPNLIILPLAFGKRQGREFIWNDLLSLETGSLKLANGRVIEKTLYNRRTRQDEPALFVALTFERREVLDSSNIKPMNLIGVDRGENIPAVIALTDPEGCPLSRFKDSLGNPTHILRIGESYKEKQRTIQAKKEVEQRRAGGYSRKYASKAKNLADDMVRNTARDLLYYAVTQDAMLIFENLSRGFGRQGKRTFMAERQYTRMEDWLTAKLARYEGLPSKTYLSKTLAQYTSKTCSNCGFTITSADYDRVLEKLKKTATGWMTTINGKELKVEGQITYYNRYKRQNVVKDLSVELDRLSEESVNNDISSWTKGRSGEALSLLKKRFSHRPVQEKFVCLNCGFETHADEQAALNIARSWLFLRSQEYKKYQTNKTTGNTDKRAFVETWQSFYRKKLKEVWKPAV

SEQ ID NO: 40882 - protein, 978 aa, Artificial Sequence
  CasX variant
QEIKRINKIRRRLVKDSNTKKAGKTGPMKTLLVRVMTPDLRERLENLRKKPENIPQPISNTSRANLNKLLTDYTEMKKAILHVYWEEFQKDPVGLMSRVAQPASKKIDQNKLKPEMDEKGNLTTAGFACSQCGQPLFVYKLEQVSEKGKAYTNYFGRCNVAEHEKLILLAQLKPEKDSDEAVTYSLGKFGQRALDFYSIHVTKESTHPVKPLAQIAGNRYASGPVGKALSDACMGTIASFLSKYQDIIIEHQKVVKGNQKRLESLRELAGKENLEYPSVTLPPQPHTKEGVDAYNEVIARVRMWVNLNLWQKLKLSRDDAKPLLRLKGFPSFPLVERQANEVDWWDMVCNVKKLINEKKEDGKVFWQNLAGYKRQEALRPYLSSEEDRKKGKKFARYQLGDLLLHLEKKHGEDWGKVYDEAWERIDKKVEGLSKHIKLEEERRSEDAQSKAALTDWLRAKASFVIEGLKEADKDEFCRCELKLQKWYGDLRGKPFAIEAENSILDISGFSKQYNCAFIWQKDGVKKLNLYLIINYFKGGKLRFKKIKPEAFEANRFYTVINKKSGEIVPMEVNFNFDDPNLIILPLAFGKRQGREFIWNDLLSLETGSLKLANGRVIEKTLYNRRTRQDEPALFVALTFERREVLDSSNIKPMNLIGVDRGENIPAVIALTDPEGCPLSRFKDSLGNPTHILRIGESYKEKQRTIQAKKEVEQRRAGGYSRKYASKAKNLADDMVRNTARDLLYYAVTQDAMLIFENLSRGFGRQGKRTFMAERQYTRMEDWLTAKLAYEGLPSKTYLSKTLAQYFSKTCSNCGFTITSADYDRVLEKLKKTATGWMTTINGKELKVEGQITYYNRYKRQNVVKDLSVELDRLSEESVNNDISSWTKGRSGEALSLLKKRFSHRPVQEKFVCLNCGFETHADEQAALNIARSWLFLRSQEYKKYQTNKTTGNTDKRAFVETWQSFYRKKLKEVWKPAV

SEQ ID NO: 40883 - protein, 977 aa, Artificial Sequence
  CasX variant
QEIKRINKIRRRLVKDSNTKKAGKTGPMKTLLVRVMTPDLRERLENLRKKPENIPQPISNTSRANLNKLLTDYTEMKKAILHVYWEEFQKDPVGLMSRVAQPASKKIDQNKLKPEMDEKGNLTTAGFACSQCGQPLFVYKLEQVSEKGKAYTNYFGRCNVAEHEKLILLAQLKPEKDSDEAVTYSLGKFGQRALDFYSIHVTKESTHPVKPLAQIAGNRYASGPVGKALSDACMGTIASFLSKYQDIIIEHQKVVKGNQKRLESLRELAGKENLEYPSVTLPPQPHTKEGVDAYNEVIARVRMWVNLNLWQKLKLSRDDAKPLLRLKGFPSFPLVERQANEVDWWDMVCNVKKLINEKKEDGKVFWQNLAGYKRQEALRPYLSSEEDRKKGKKFARYQLGDLLLHLEKKHGEDWGKVYDEAWERIDKKVEGLSKHIKLEEERRSEDAQSKAALTDWLRAKASFVIEGLKEADKDEFCRCELKLQKWYGDLRGKPFAIEAENSILDISGFSKQYNCAFIWQKDGVKKLNLYLIINYFKGGKLRFKKIKPEAFEANRFYTVINKKSGEIVPMEVNFNFDDPNLIILPLAFGKRQGREFIWNDLLSLETGSLKLANGRVIEKTLYNRRTRQDEPALFVALTFERREVLDSSNIKPMNLIGVDRGENIPAVIALTDPEGCPLSRFKDSLGNPTHILRIGESYKEKQRTIQAKKEVEQRRAGGYSRKYASKAKNLADDMVRNTARDLLYYAVTQDAMLIFENLSRGFGRQGKRTFMAERQYTRMEDWLTAKAYEGLPSKTYLSKTLAQYTSKTCSNCGFTITSADYDRVLEKLKKTATGWMTTINGKELKVEGQITYYNRYKRQNVVKDLSVELDRLSEESVNNDISSWTKGRSGEALSLLKKRFSHRPVQEKFVCLNCGFETHADEQAALNIARSWLFLRSQEYKKYQTNKTTGNTDKRAFVETWQSFYRKKLKEVWKPAV

SEQ ID NO: 40884 - protein, 978 aa, Artificial Sequence
  CasX variant
QEIKRINKIRRRLVKDSNTKKAGKTGPMKTLLVRVMTPDLRERLENLRKKPENIPQPISNTSRANLNKLLTDYTEMKKAILHVYWEEFQKDPVGLMSRVAQPASKKIDQNKLKPEMDEKGNLTTAGFACSQCGQPLFVYKLEQVSEKGKAYTNYFGRCNVAEHEKLILLAQLKPEKDSDEAVTYSLGKFGQRALDFYSIHVTKESTHPVKPLAQIAGNRYASGPVGKALSDACMGTIASFLSKYQDIIIEHQKVVKGNQKRLESLRELAGKENLEYPSVTLPPQPHTKEGVDAYNEVIARVRMWVNLNLWQKLKLSRDDAKPLLRLKGFPSFPLVERQANEVDWWDMVCNVKKLINEKKEDGKVFWQNLAGYKRQEALRPYLSSEEDRKKGKKFARYQLGDLLLHLEKKHGEDWGKVYDEAWERIDKKVEGLSKHIKLEEERRSEDAQSKAALTDWLRAKASFVIEGLKEADKDEFCRCELKLQKWYGDLRGKPFAIEAENSILDISGFSKQYNCAFIWQKDGVKKLNLYLIINYFKGGKLRFKKIKPEAFEANRFYTVINKKSGEIVPMEVNFNFDDPNLIILPLAFGKRQGREFIWNDLLSLETGSLKLANGRVIEKTLYNRRTRQDEPALFVALTFERREVLDSSNIKPMNLIGVDRGENIPAVIALTDPEGCPLSRFKDSLGNPTHILRIGESYKEKQRTIQAKKEVEQRRAGGYSRKYASKAKNLADDMVRNTARDLLYYAVTQDAMLIFENLSRGFGRQGKRTFMAERQYTRMEDWLTAKLAYEGLPSQTYLSKTLAQYTSKTCSNCGFTITSADYDRVLEKLKKTATGWMTTINGKELKVEGQITYYNRYKRQNVVKDLSVELDRLSEESVNNDISSWTKGRSGEALSLLKKRFSHRPVQEKFVCLNCGFETHADEQAALNIARSWLFLRSQEYKKYQTNKTTGNTDKRAFVETWQSFYRKKLKEVWKPAV

SEQ ID NO: 40885 - protein, 978 aa, Artificial Sequence
  CasX variant
QEIKRINKIRRRLVKDSNTKKAGKTGPMKTLLVRVMTPDLRERLENLRKKPENIPQPISNTSRANLNKLLTDYTEMKKAILHVYWEEFQKDPVGLMSRVAQPASKKIDQNKLKPEMDEKGNLTTAGFACSQCGQPLFVYKLEQVSEKGKAYTNYFGRCNVAEHEKLILLAQLKPEKDSDEAVTYSLGKFGQRALDFYSIHVTKESTHPVKPLAQIAGNRYASGPVGKALSDACMGTIASFLSKYQDIIIEHQKVVKGNQKRLESLRELAGKENLEYPSVTLPPQPHTKEGVDAYNEVIARVRMWVNLNLWQKLKLSRDDAKPLLRLKGFPSFPLVERQANEVDWWDMVCNVKKLINEKKEDGKVFWQNLAGYKRQEALRPYLSSEEDRKKGKKFARYQLGDLLLHLEKKHGEDWGKVYDEAWERIDKKVEGLSKHIKLEEERRSEDAQSKAALTDWLRAKASFVIEGLKEADKDEFCRCELKLQKWYGDLRGKPFAIEAENSILDISGFSKQYNCAFIWQKDGVKKLNLYLIINYFKGGKLRFKKIKPEAFEANRFYTVINKKSGEIVPMEVNFNFDDPNLIILPLAFGKRQGREFIWNDLLSLETGSLKLANGRVIEKTLYNRRTRQDEPALFVALTFERREVLDSSNIKPMNLIGVDRGENIPAVIALTDPEGCPLSRFKDSLGNPTHILRIGESYKEKQRTIQAKKEVEQRRAGGYSRKYASKAKNLADDMVRNTARDLLYYAVTQDAMLIFENLSRGFGRQGKRTFMAERQYTRMEDWLTAKLAYNGLPSKTYLSKTLAQYTSKTCSNCGFTITSADYDRVLEKLKKTATGWMTTINGKELKVEGQITYYNRYKRQNVVKDLSVELDRLSEESVNNDISSWTKGRSGEALSLLKKRFSHRPVQEKFVCLNCGFETHADEQAALNIARSWLFLRSQEYKKYQTNKTTGNTDKRAFVETWQSFYRKKLKEVWKPAV

SEQ ID NO: 40886 - protein, 979 aa, Artificial Sequence
  CasX variant
QEIKRINKIRRRLVKDSNTKKAGKTGPMKTLLVRVMTPDLRERLENLRKKPENIPQPISNTSRANLNKLLTDYTEMKKAILHVYWEEFQKDPVGLMSRVAQPASKKIDQNKLKPEMDEKGNLTTAGFACSQCGQPLFVYKLEQVSEKGKAYTNYFGRCNVAEHEKLILLAQLKPEKDSDEAVTYSLGKFGQRALDFYSIHVTKESTHPVKPLAQIAGNRYASGPVGKALSDACMGTIASFLSKYQDIIIEHQKVVKGNQKRLESLRELAGKENLEYPSVTLPPQPHTKEGVDAYNEVIARVRMWVNLNLWQKLKLSRDDAKPLLRLKGFPSFPLVERQANEVDWWDMVCNVKKLINEKKEDGKVFWQNLAGYKRQEALRPYLSSEEDRKKGKKFARYQLGDLLLHLEKKHGEDWGKVYDEAWERIDKKVEGLSKHIKLEEERRSEDAQSKAALTDWLRAKASFVIEGLKEADKDEFCRCELKLQKWYGDLRGKPFAIEAENSILDISGFSKQYNCAFIWQKDGVKKLNLYLIINYFKGGKLRFKKIKPEAFEANRFYTVINKKSGEIVPMEVNFNFDDPNLIILPLAFGKRQGREFIWNDLLSLETGSLKLANGRVIEKTLYNRRTRQDEPALFVALTFERREVLDSSNIKPMNLIGVDRGENIPAVIALTDPEGCPLSRFKDSLGNPTHILRIGESYKEKQRTIQAKKEVEQRRAGGYSRKYASKAKNLADDMVRNTARDLLYYAVTQDAMLIFENLSRGFGRQGKRTFMAERQYTRMEDWLTAKLAYEGLPSKTYLHSKTLAQYTSKTCSNCGFTITSADYDRVLEKLKKTATGWMTTINGKELKVEGQITYYNRYKRQNVVKDLSVELDRLSEESVNNDISSWTKGRSGEALSLLKKRFSHRPVQEKFVCLNCGFETHADEQAALNIARSWLFLRSQEYKKYQTNKTTGNTDKRAFVETWQSFYRKKLKEVWKPAV

SEQ ID NO: 40887 - protein, 978 aa, Artificial Sequence
  CasX variant
QEIKRINKIRRRLVKDSNTKKAGKTGPMKTLLVRVMTPDLRERLENLRKKPENIPQPISNTSRANLNKLLTDYTEMKKAILHVYWEEFQKDPVGLMSRVAQPASKKIDQNKLKPEMDEKGNLTTAGFACSQCGQPLFVYKLEQVSEKGKAYTNYFGRCNVAEHEKLILLAQLKPEKDSDEAVTYSLGKFGQRALDFYSIHVTKESTHPVKPLAQIAGNRYASGPVGKALSDACMGTIASFLSKYQDIIIEHQKVVKGNQKRLESLRELAGKENLEYPSVTLPPQPHTKEGVDAYNEVIARVRMWVNLNLWQKLKLSRDDAKPLLRLKGFPSFPLVERQANEVDWWDMVCNVKKLINEKKEDGKVFWQNLAGYKRQEALRPYLSSEEDRKKGKKFARYQLGDLLLHLEKKHGEDWGKVYDEAWERIDKKVEGLSKHIKLEEERRSEDAQSKAALTDWLRAKASFVIEGLKEADKDEFCRCELKLQKWYGDLRGKPFAIEAENSILDISGFSKQYNCAFIWQKDGVKKLNLYLIINYFKGGKLRFKKIKPEAFEANRFYTVINKKSGEIVPMEVNFNFDDPNLIILPLAFGKRQGREFIWNDLLSLETGSLKLANGRVIEKTLYNRRTRQDEPALFVALTFERREVLDSSNIKPMNLIGVDRGENIPAVIALTDPEGCPLSRFKDSLGNPTHILRIGESYKEKQRTIQAKKEVEQRRAGGYSRKYASKAKNLADDMVRNTARDLLYYAVTQDAMLIFENLSRGFGRQGKRTFMAERQYTRMEDWLTAKLAYEGLPSKVYLSKTLAQYTSKTCSNCGFTITSADYDRVLEKLKKTATGWMTTINGKELKVEGQITYYNRYKRQNVVKDLSVELDRLSEESVNNDISSWTKGRSGEALSLLKKRFSHRPVQEKFVCLNCGFETHADEQAALNIARSWLFLRSQEYKKYQTNKTTGNTDKRAFVETWQSFYRKKLKEVWKPAV

SEQ ID NO: 40888 - protein, 979 aa, Artificial Sequence
  CasX variant
QEIKRINKIRRRLVKDSNTKKAGKTGPMKTLLVRVMTPDLRERLENLRKKPENIPQPISNTSRANLNKLLTDYTEMKKAILHVYWEEFQKDPVGLMSRVAQPASKKIDQNKLKPEMDEKGNLTTAGFACSQCGQPLFVYKLEQVSEKGKAYTNYFGRCNVAEHEKLILLAQLKPEKDSDEAVTYSLGKFGQRALDFYSIHVTKESTHPVKPLAQIAGNRYASGPVGKALSDACMGTIASFLSKYQDIIIEHQKVVKGNQKRLESLRELAGKENLEYPSVTLPPQPHTKEGVDAYNEVIARVRMWVNLNLWQKLKLSRDDAKPLLRLKGFPSFPLVERQANEVDWWDMVCNVKKLINEKKEDGKVFWQNLAGYKRQEALRPYLSSEEDRKKGKKFARYQLGDLLLHLEKKHGEDWGKVYDEAWERIDKKVEGLSKHIKLEEERRSEDAQSKAALTDWLRAKASFVIEGLKEADKDEFCRCELKLQKWYGDLRGKPFAIEAENSILDISGFSKQYNCAFIWQKDGVKKLNLYLIINYFKGGKLRFKKIKPEAFEANRFYTVINKKSGEIVPMEVNFNFDDPNLIILPLAFGKRQGREFIWNDLLSLETGSLKLANGRVIEKTLYNRRTRQDEPALFVALTFERREVLDSSNIKPMNLIGVDRGENIPAVIALTDPEGCPLSRFKDSLGNPTHILRIGESYKEKQRTIQAKKEVEQRRAGGYSRKYASKAKNLADDMVRNTARDLLYYAVTQDAMLIFENLSRGFGRQGKRTFMAERQYTRMEDWLTAKLQAYEGLPSKTYLSKTLAQYTSKTCSNCGFTITSADYDRVLEKLKKTATGWMTTINGKELKVEGQITYYNRYKRQNVVKDLSVELDRLSEESVNNDISSWTKGRSGEALSLLKKRFSHRPVQEKFVCLNCGFETHADEQAALNIARSWLFLRSQEYKKYQTNKTTGNTDKRAFVETWQSFYRKKLKEVWKPAV

SEQ ID NO: 40889 - protein, 979 aa, Artificial Sequence
  CasX variant
QEIKRINKIRRRLVKDSNTKKAGKTGPMKTLLVRVMTPDLRERLENLRKKPENIPQPISNTSRANLNKLLTDYTEMKKAILHVYWEEFQKDPVGLMSRVAQPASKKIDQNKLKPEMDEKGNLTTAGFACSQCGQPLFVYKLEQVSEKGKAYTNYFGRCNVAEHEKLILLAQLKPEKDSDEAVTYSLGKFGQRALDFYSIHVTKESTHPVKPLAQIAGNRYASGPVGKALSDACMGTIASFLSKYQDIIIEHQKVVKGNQKRLESLRELAGKENLEYPSVTLPPQPHTKEGVDAYNEVIARVRMWVNLNLWQKLKLSRDDAKPLLRLKGFPSFPLVERQANEVDWWDMVCNVKKLINEKKEDGKVFWQNLAGYKRQEALRPYLSSEEDRKKGKKFARYQLGDLLLHLEKKHGEDWGKVYDEAWERIDKKVEGLSKHIKLEEERRSEDAQSKAALTDWLRAKASFVIEGLKEADKDEFCRCELKLQKWYGDLRGKPFAIEAENSILDISGFSKQYNCAFIWQKDGVKKLNLYLIINYFKGGKLRFKKIKPEAFEANRFYTVINKKSGEIVPMEVNFNFDDPNLIILPLAFGKRQGREFIWNDLLSLETGSLKLANGRVIEKTLYNRRTRQDEPALFVALTFERREVLDSSNIKPMNLIGVDRGENIPAVIALTDPEGCPLSRFKDSLGNPTHILRIGESYKEKQRTIQAKKEVEQRRAGGYSRKYASKAKNLADDMVRNTARDLLYYAVTQDAMLIFENLSRGFGRQGKRTFMAERQYTRMEDWLTAKLAYEGPLPSKTYLSKTLAQYTSKTCSNCGFTITSADYDRVLEKLKKTATGWMTTINGKELKVEGQITYYNRYKRQNVVKDLSVELDRLSEESVNNDISSWTKGRSGEALSLLKKRFSHRPVQEKFVCLNCGFETHADEQAALNIARSWLFLRSQEYKKYQTNKTTGNTDKRAFVETWQSFYRKKLKEVWKPAV

SEQ ID NO: 40890 - protein, 979 aa, Artificial Sequence
  CasX variant
QEIKRINKIRRRLVKDSNTKKAGKTGPMKTLLVRVMTPDLRERLENLRKKPENIPQPISNTSRANLNKLLTDYTEMKKAILHVYWEEFQKDPVGLMSRVAQPASKKIDQNKLKPEMDEKGNLTTAGFACSQCGQPLFVYKLEQVSEKGKAYTNYFGRCNVAEHEKLILLAQLKPEKDSDEAVTYSLGKFGQRALDFYSIHVTKESTHPVKPLAQIAGNRYASGPVGKALSDACMGTIASFLSKYQDIIIEHQKVVKGNQKRLESLRELAGKENLEYPSVTLPPQPHTKEGVDAYNEVIARVRMWVNLNLWQKLKLSRDDAKPLLRLKGFPSFPLVERQANEVDWWDMVCNVKKLINEKKEDGKVFWQNLAGYKRQEALRPYLSSEEDRKKGKKFARYQLGDLLLHLEKKHGEDWGKVYDEAWERIDKKVEGLSKHIKLEEERRSEDAQSKAALTDWLRAKASFVIEGLKEADKDEFCRCELKLQKWYGDLRGKPFAIEAENSILDISGFSKQYNCAFIWQKDGVKKLNLYLIINYFKGGKLRFKKIKPEAFEANRFYTVINKKSGEIVPMEVNFNFDDPNLIILPLAFGKRQGREFIWNDLLSLETGSLKLANGRVIEKTLYNRRTRQDEPALFVALTFERREVLDSSNIKPMNLIGVDRGENIPAVIALTDPEGCPLSRFKDSLGNPTHILRIGESYKEKQRTIQAKKEVEQRRAGGYSRKYASKAKNLADDMVRNTARDLLYYAVTQDAMLIFENLSRGFGRQGKRTFMAERQYTRMEDWLTAKLAYEGLPSKTYLSKRTLAQYTSKTCSNCGFTITSADYDRVLEKLKKTATGWMTTINGKELKVEGQITYYNRYKRQNVVKDLSVELDRLSEESVNNDISSWTKGRSGEALSLLKKRFSHRPVQEKFVCLNCGFETHADEQAALNIARSWLFLRSQEYKKYQTNKTTGNTDKRAFVETWQSFYRKKLKEVWKPAV

SEQ ID NO: 40891 - protein, 979 aa, Artificial Sequence
  CasX variant
QEIKRINKIRRRLVKDSNTKKAGKTGPMKTLLVRVMTPDLRERLENLRKKPENIPQPISNTSRANLNKLLTDYTEMKKAILHVYWEEFQKDPVGLMSRVAQPASKKIDQNKLKPEMDEKGNLTTAGFACSQCGQPLFVYKLEQVSEKGKAYTNYFGRCNVAEHEKLILLAQLKPEKDSDEAVTYSLGKFGQRALDFYSIHVTKESTHPVKPLAQIAGNRYASGPVGKALSDACMGTIASFLSKYQDIIIEHQKVVKGNQKRLESLRELAGKENLEYPSVTLPPQPHTKEGVDAYNEVIARVRMWVNLNLWQKLKLSRDDAKPLLRLKGFPSFPLVERQANEVDWWDMVCNVKKLINEKKEDGKVFWQNLAGYKRQEALRPYLSSEEDRKKGKKFARYQLGDLLLHLEKKHGEDWGKVYDEAWERIDKKVEGLSKHIKLEEERRSEDAQSKAALTDWLRAKASFVIEGLKEADKDEFCRCELKLQKWYGDLRGKPFAIEAENSILDISGFSKQYNCAFIWQKDGVKKLNLYLIINYFKGGKLRFKKIKPEAFEANRFYTVINKKSGEIVPMEVNFNFDDPNLIILPLAFGKRQGREFIWNDLLSLETGSLKLANGRVIEKTLYNRRTRQDEPALFVALTFERREVLDSSNIKPMNLIGVDRGENIPAVIALTDPEGCPLSRFKDSLGNPTHILRIGESYKEKQRTIQAKKEVEQRRAGGYSRKYASKAKNLADDMVRNTARDLLYYAVTQDAMLIFENLSRGFGRQGKRTFMAERQYTRMEDWLTAKLAYEGLPSKTYLSKTLAQYTSKTCSNCWGFTITSADYDRVLEKLKKTATGWMTTINGKELKVEGQITYYNRYKRQNVVKDLSVELDRLSEESVNNDISSWTKGRSGEALSLLKKRFSHRPVQEKFVCLNCGFETHADEQAALNIARSWLFLRSQEYKKYQTNKTTGNTDKRAFVETWQSFYRKKLKEVWKPAV

SEQ ID NO: 40892 - protein, 979 aa, Artificial Sequence
  CasX variant
QEIKRINKIRRRLVKDSNTKKAGKTGPMKTLLVRVMTPDLRERLENLRKKPENIPQPISNTSRANLNKLLTDYTEMKKAILHVYWEEFQKDPVGLMSRVAQPASKKIDQNKLKPEMDEKGNLTTAGFACSQCGQPLFVYKLEQVSEKGKAYTNYFGRCNVAEHEKLILLAQLKPEKDSDEAVTYSLGKFGQRALDFYSIHVTKESTHPVKPLAQIAGNRYASGPVGKALSDACMGTIASFLSKYQDIIIEHQKVVKGNQKRLESLRELAGKENLEYPSVTLPPQPHTKEGVDAYNEVIARVRMWVNLNLWQKLKLSRDDAKPLLRLKGFPSFPLVERQANEVDWWDMVCNVKKLINEKKEDGKVFWQNLAGYKRQEALRPYLSSEEDRKKGKKFARYQLGDLLLHLEKKHGEDWGKVYDEAWERIDKKVEGLSKHIKLEEERRSEDAQSKAALTDWLRAKASFVIEGLKEADKDEFCRCELKLQKWYGDLRGKPFAIEAENSILDISGFSKQYNCAFIWQKDGVKKLNLYLIINYFKGGKLRFKKIKPEAFEANRFYTVINKKSGEIVPMEVNFNFDDPNLIILPLAFGKRQGREFIWNDLLSLETGSLKLANGRVIEKTLYNRRTRQDEPALFVALTFERREVLDSSNIKPMNLIGVDRGENIPAVIALTDPEGCPLSRFKDSLGNPTHILRIGESYKEKQRTIQAKKEVEQRRAGGYSRKYASKAKNLADDMVRNTARDLLYYAVTQDAMLIFENLSRGFGRQGKRTFMAERQYTRMEDWLTAKLANYEGLPSKTYLSKTLAQYTSKTCSNCGFTITSADYDRVLEKLKKTATGWMTTINGKELKVEGQITYYNRYKRQNVVKDLSVELDRLSEESVNNDISSWTKGRSGEALSLLKKRFSHRPVQEKFVCLNCGFETHADEQAALNIARSWLFLRSQEYKKYQTNKTTGNTDKRAFVETWQSFYRKKLKEVWKPAV

SEQ ID NO: 40893 - protein, 978 aa, Artificial Sequence
  CasX variant
QEIKRINKIRRRLVKDSNTKKAGKTGPMKTLLVRVMTPDLRERLENLRKKPENIPQPISNTSRANLNKLLTDYTEMKKAILHVYWEEFQKDPVGLMSRVAQPASKKIDQNKLKPEMDEKGNLTTAGFACSQCGQPLFVYKLEQVSEKGKAYTNYFGRCNVAEHEKLILLAQLKPEKDSDEAVTYSLGKFGQRALDFYSIHVTKESTHPVKPLAQIAGNRYASGPVGKALSDACMGTIASFLSKYQDIIIEHQKVVKGNQKRLESLRELAGKENLEYPSVTLPPQPHTKEGVDAYNEVIARVRMWVNLNLWQKLKLSRDDAKPLLRLKGFPSFPLVERQANEVDWWDMVCNVKKLINEKKEDGKVFWQNLAGYKRQEALRPYLSSEEDRKKGKKFARYQLGDLLLHLEKKHGEDWGKVYDEAWERIDKKVEGLSKHIKLEEERRSEDAQSKAALTDWLRAKASFVIEGLKEADKDEFCRCELKLQKWYGDLRGKPFAIEAENSILDISGFSKQYNCAFIWQKDGVKKLNLYLIINYFKGGKLRFKKIKPEAFEANRFYTVINKKSGEIVPMEVNFNFDDPNLIILPLAFGKRQGREFIWNDLLSLETGSLKLANGRVIEKTLYNRRTRQDEPALFVALTFERREVLDSSNIKPMNLIGVDRGENIPAVIALTDPEGCPLSRFKDSLGNPTHILRIGESYKEKQRTIQAKKEVEQRRAGGYSRKYASKAKNLADDMVRNTARDLLYYAVTQDAMLIFENLSRGFGRQGKRTFMAERQYTRMEDWLTAKLAYEGLPSKTYLSKTLAQYTSKTCSNSGFTITSADYDRVLEKLKKTATGWMTTINGKELKVEGQITYYNRYKRQNVVKDLSVELDRLSEESVNNDISSWTKGRSGEALSLLKKRFSHRPVQEKFVCLNCGFETHADEQAALNIARSWLFLRSQEYKKYQTNKTTGNTDKRAFVETWQSFYRKKLKEVWKPAV

SEQ ID NO: 40894 - protein, 978 aa, Artificial Sequence
  CasX variant
QEIKRINKIRRRLVKDSNTKKAGKTGPMKTLLVRVMTPDLRERLENLRKKPENIPQPISNTSRANLNKLLTDYTEMKKAILHVYWEEFQKDPVGLMSRVAQPASKKIDQNKLKPEMDEKGNLTTAGFACSQCGQPLFVYKLEQVSEKGKAYTNYFGRCNVAEHEKLILLAQLKPEKDSDEAVTYSLGKFGQRALDFYSIHVTKESTHPVKPLAQIAGNRYASGPVGKALSDACMGTIASFLSKYQDIIIEHQKVVKGNQKRLESLRELAGKENLEYPSVTLPPQPHTKEGVDAYNEVIARVRMWVNLNLWQKLKLSRDDAKPLLRLKGFPSFPLVERQANEVDWWDMVCNVKKLINEKKEDGKVFWQNLAGYKRQEALRPYLSSEEDRKKGKKFARYQLGDLLLHLEKKHGEDWGKVYDEAWERIDKKVEGLSKHIKLEEERRSEDAQSKAALTDWLRAKASFVIEGLKEADKDEFCRCELKLQKWYGDLRGKPFAIEAENSILDISGFSKQYNCAFIWQKDGVKKLNLYLIINYFKGGKLRFKKIKPEAFEANRFYTVINKKSGEIVPMEVNFNFDDPNLIILPLAFGKRQGREFIWNDLLSLETGSLKLANGRVIEKTLYNRRTRQDEPALFVALTFERREVLDSSNIKPMNLIGVDRGENIPAVIALTDPEGCPLSRFKDSLGNPTHILRIGESYKEKQRTIQAKKEVEQRRAGGYSRKYASKAKNLADDMVRNTARDLLYYAVTQDAMLIFENLSRGFGRQGKRTFMAERQYTRMEDWLTAKLAYEGLPSKTYLSKTLSQYTSKTCSNCGFTITSADYDRVLEKLKKTATGWMTTINGKELKVEGQITYYNRYKRQNVVKDLSVELDRLSEESVNNDISSWTKGRSGEALSLLKKRFSHRPVQEKFVCLNCGFETHADEQAALNIARSWLFLRSQEYKKYQTNKTTGNTDKRAFVETWQSFYRKKLKEVWKPAV

SEQ ID NO: 40895 - protein, 979 aa, Artificial Sequence
  CasX variant
QEIKRINKIRRRLVKDSNTKKAGKTGPMKTLLVRVMTPDLRERLENLRKKPENIPQPISNTSRANLNKLLTDYTEMKKAILHVYWEEFQKDPVGLMSRVAQPASKKIDQNKLKPEMDEKGNLTTAGFACSQCGQPLFVYKLEQVSEKGKAYTNYFGRCNVAEHEKLILLAQLKPEKDSDEAVTYSLGKFGQRALDFYSIHVTKESTHPVKPLAQIAGNRYASGPVGKALSDACMGTIASFLSKYQDIIIEHQKVVKGNQKRLESLRELAGKENLEYPSVTLPPQPHTKEGVDAYNEVIARVRMWVNLNLWQKLKLSRDDAKPLLRLKGFPSFPLVERQANEVDWWDMVCNVKKLINEKKEDGKVFWQNLAGYKRQEALRPYLSSEEDRKKGKKFARYQLGDLLLHLEKKHGEDWGKVYDEAWERIDKKVEGLSKHIKLEEERRSEDAQSKAALTDWLRAKASFVIEGLKEADKDEFCRCELKLQKWYGDLRGKPFAIEAENSILDISGFSKQYNCAFIWQKDGVKKLNLYLIINYFKGGKLRFKKIKPEAFEANRFYTVINKKSGEIVPMEVNFNFDDPNLIILPLAFGKRQGREFIWNDLLSLETGSLKLANGRVIEKTLYNRRTRQDEPALFVALTFERREVLDSSNIKPMNLIGVDRGENIPAVIALTDPEGCPLSRFKDSLGNPTHILRIGESYKEKQRTIQAKKEVEQRRAGGYSRKYASKAKNLADDMVRNTARDLLYYAVTQDAMLIFENLSRGFGRQGKRTFMAERQYTRMEDWLTAKLAYEGLPSKTYRLSKTLAQYTSKTCSNCGFTITSADYDRVLEKLKKTATGWMTTINGKELKVEGQITYYNRYKRQNVVKDLSVELDRLSEESVNNDISSWTKGRSGEALSLLKKRFSHRPVQEKFVCLNCGFETHADEQAALNIARSWLFLRSQEYKKYQTNKTTGNTDKRAFVETWQSFYRKKLKEVWKPAV

SEQ ID NO: 40896 - protein, 978 aa, Artificial Sequence
  CasX variant
QEIKRINKIRRRLVKDSNTKKAGKTGPMKTLLVRVMTPDLRERLENLRKKPENIPQPISNTSRANLNKLLTDYTEMKKAILHVYWEEFQKDPVGLMSRVAQPASKKIDQNKLKPEMDEKGNLTTAGFACSQCGQPLFVYKLEQVSEKGKAYTNYFGRCNVAEHEKLILLAQLKPEKDSDEAVTYSLGKFGQRALDFYSIHVTKESTHPVKPLAQIAGNRYASGPVGKALSDACMGTIASFLSKYQDIIIEHQKVVKGNQKRLESLRELAGKENLEYPSVTLPPQPHTKEGVDAYNEVIARVRMWVNLNLWQKLKLSRDDAKPLLRLKGFPSFPLVERQANEVDWWDMVCNVKKLINEKKEDGKVFWQNLAGYKRQEALRPYLSSEEDRKKGKKFARYQLGDLLLHLEKKHGEDWGKVYDEAWERIDKKVEGLSKHIKLEEERRSEDAQSKAALTDWLRAKASFVIEGLKEADKDEFCRCELKLQKWYGDLRGKPFAIEAENSILDISGFSKQYNCAFIWQKDGVKKLNLYLIINYFKGGKLRFKKIKPEAFEANRFYTVINKKSGEIVPMEVNFNFDDPNLIILPLAFGKRQGREFIWNDLLSLETGSLKLANGRVIEKTLYNRRTRQDEPALFVALTFERREVLDSSNIKPMNLIGVDRGENIPAVIALTDPEGCPLSRFKDSLGNPTHILRIGESYKEKQRTIQAKKEVEQRRAGGYSRKYASKAKNLADDMVRNTARDLLYYAVTQDAMLIFENLSRGFGRQGKRTFMAERQYTRMEDWLTAKRAYEGLPSKTYLSKTLAQYTSKTCSNCGFTITSADYDRVLEKLKKTATGWMTTINGKELKVEGQITYYNRYKRQNVVKDLSVELDRLSEESVNNDISSWTKGRSGEALSLLKKRFSHRPVQEKFVCLNCGFETHADEQAALNIARSWLFLRSQEYKKYQTNKTTGNTDKRAFVETWQSFYRKKLKEVWKPAV

SEQ ID NO: 40897 - protein, 978 aa, Artificial Sequence
  CasX variant
QEIKRINKIRRRLVKDSNTKKAGKTGPMKTLLVRVMTPDLRERLENLRKKPENIPQPISNTSRANLNKLLTDYTEMKKAILHVYWEEFQKDPVGLMSRVAQPASKKIDQNKLKPEMDEKGNLTTAGFACSQCGQPLFVYKLEQVSEKGKAYTNYFGRCNVAEHEKLILLAQLKPEKDSDEAVTYSLGKFGQRALDFYSIHVTKESTHPVKPLAQIAGNRYASGPVGKALSDACMGTIASFLSKYQDIIIEHQKVVKGNQKRLESLRELAGKENLEYPSVTLPPQPHTKEGVDAYNEVIARVRMWVNLNLWQKLKLSRDDAKPLLRLKGFPSFPLVERQANEVDWWDMVCNVKKLINEKKEDGKVFWQNLAGYKRQEALRPYLSSEEDRKKGKKFARYQLGDLLLHLEKKHGEDWGKVYDEAWERIDKKVEGLSKHIKLEEERRSEDAQSKAALTDWLRAKASFVIEGLKEADKDEFCRCELKLQKWYGDLRGKPFAIEAENSILDISGFSKQYNCAFIWQKDGVKKLNLYLIINYFKGGKLRFKKIKPEAFEANRFYTVINKKSGEIVPMEVNFNFDDPNLIILPLAFGKRQGREFIWNDLLSLETGSLKLANGRVIEKTLYNRRTRQDEPALFVALTFERREVLDSSNIKPMNLIGVDRGENIPAVIALTDPEGCPLSRFKDSLGNPTHILRIGESYKEKQRTIQAKKEVEQRRAGGYSRKYASKAKNLADDMVRNTARDLLYYAVTQDAMLIFENLSRGFGRQGKRTFMAERQYTRMEDWLTAKDAYEGLPSKTYLSKTLAQYTSKTCSNCGFTITSADYDRVLEKLKKTATGWMTTINGKELKVEGQITYYNRYKRQNVVKDLSVELDRLSEESVNNDISSWTKGRSGEALSLLKKRFSHRPVQEKFVCLNCGFETHADEQAALNIARSWLFLRSQEYKKYQTNKTTGNTDKRAFVETWQSFYRKKLKEVWKPAV

SEQ ID NO: 40898 - protein, 978 aa, Artificial Sequence
  CasX variant
QEIKRINKIRRRLVKDSNTKKAGKTGPMKTLLVRVMTPDLRERLENLRKKPENIPQPISNTSRANLNKLLTDYTEMKKAILHVYWEEFQKDPVGLMSRVAQPASKKIDQNKLKPEMDEKGNLTTAGFACSQCGQPLFVYKLEQVSEKGKAYTNYFGRCNVAEHEKLIQLAQLKPEKDSDEAVTYSLGKFGQRALDFYSIHVTKESTHPVKPLAQIAGNRYASGPVGKALSDACMGTIASFLSKYQDIIIEHQKVVKGNQKRLESLRELAGKENLEYPSVTLPPQPHTKEGVDAYNEVIARVRMWVNLNLWQKLKLSRDDAKPLLRLKGFPSFPLVERQANEVDWWDMVCNVKKLINEKKEDGKVFWQNLAGYKRQEALRPYLSSEEDRKKGKKFARYQLGDLLLHLEKKHGEDWGKVYDEAWERIDKKVEGLSKHIKLEEERRSEDAQSKAALTDWLRAKASFVIEGLKEADKDEFCRCELKLQKWYGDLRGKPFAIEAENSILDISGFSKQYNCAFIWQKDGVKKLNLYLIINYFKGGKLRFKKIKPEAFEANRFYTVINKKSGEIVPMEVNFNFDDPNLIILPLAFGKRQGREFIWNDLLSLETGSLKLANGRVIEKTLYNRRTRQDEPALFVALTFERREVLDSSNIKPMNLIGVDRGENIPAVIALTDPEGCPLSRFKDSLGNPTHILRIGESYKEKQRTIQAKKEVEQRRAGGYSRKYASKAKNLADDMVRNTARDLLYYAVTQDAMLIFENLSRGFGRQGKRTFMAERQYTRMEDWLTAKLAYEGLPSKTYLSKTLAQYTSKTCSNCGFTITSADYDRVLEKLKKTATGWMTTINGKELKVEGQITYYNRYKRQNVVKDLSVELDRLSEESVNNDISSWTKGRSGEALSLLKKRFSHRPVQEKFVCLNCGFETHADEQAALNIARSWLFLRSQEYKKYQTNKTTGNTDKRAFVETWQSFYRKKLKEVWKPAV

SEQ ID NO: 40899 - protein, 978 aa, Artificial Sequence
  CasX variant
QEIKRINKIRRRLVKDSNTKKAGKTGPMKTLLVRVMTPDLRERLENLRKKPENIPQPISNTSRANLNKLLTDYTEMKKAILHVYWEEFQKDPVGLMSRVAQPASKKIDQNKLKPEMDEKGNLTTAGFACSQCGQPLFVYKLEQVSEKGKAYTNYFGRCNVAEHEKLILLAQLKPEKDSDEAVTYSLGKFGQRALDFYSIHVTKESTHPVKPLAQIAGNRYMSGPVGKALSDACMGTIASFLSKYQDIIIEHQKVVKGNQKRLESLRELAGKENLEYPSVTLPPQPHTKEGVDAYNEVIARVRMWVNLNLWQKLKLSRDDAKPLLRLKGFPSFPLVERQANEVDWWDMVCNVKKLINEKKEDGKVFWQNLAGYKRQEALRPYLSSEEDRKKGKKFARYQLGDLLLHLEKKHGEDWGKVYDEAWERIDKKVEGLSKHIKLEEERRSEDAQSKAALTDWLRAKASFVIEGLKEADKDEFCRCELKLQKWYGDLRGKPFAIEAENSILDISGFSKQYNCAFIWQKDGVKKLNLYLIINYFKGGKLRFKKIKPEAFEANRFYTVINKKSGEIVPMEVNFNFDDPNLIILPLAFGKRQGREFIWNDLLSLETGSLKLANGRVIEKTLYNRRTRQDEPALFVALTFERREVLDSSNIKPMNLIGVDRGENIPAVIALTDPEGCPLSRFKDSLGNPTHILRIGESYKEKQRTIQAKKEVEQRRAGGYSRKYASKAKNLADDMVRNTARDLLYYAVTQDAMLIFENLSRGFGRQGKRTFMAERQYTRMEDWLTAKLAYEGLPSKTYLSKTLAQYTSKTCSNCGFTITSADYDRVLEKLKKTATGWMTTINGKELKVEGQITYYNRYKRQNVVKDLSVELDRLSEESVNNDISSWTKGRSGEALSLLKKRFSHRPVQEKFVCLNCGFETHADEQAALNIARSWLFLRSQEYKKYQTNKTTGNTDKRAFVETWQSFYRKKLKEVWKPAV

SEQ ID NO: 40900 - protein, 978 aa, Artificial Sequence
  CasX variant
QEIKRINKIRRRLVKDSNTKKAGKTGPMKTLLVRVMTPDLRERLENLRKKPENIPQPISNTSRANLNKLLTDYTEMKKAILHVYWEEFQKDPVGLMSRVAQPASKKIDQNKLKPEMDEKGNLTTAGFACSQCGQPLFVYKLEQVSEKGKAYTNYFGRCNVAEHEKLILLAQLKPEKDSDEAVTYSLGKFGQRALDFYSIHVTKESTHPVKPLAQIAGNRYASGPVGKALSDACMGTIASFLSKYQDIIIEHQKVVKGNQKRLESLRELAGKENLEYPSVTLPPQPHTKEGVDAYNEVIARVRMWVNLNLWQKLKLSRDDAKPLLRLKGFPSFPLVERQANEVDWWDMVCNVKKLINEKKEDGKVFWQNLAIYKRQEALRPYLSSEEDRKKGKKFARYQLGDLLLHLEKKHGEDWGKVYDEAWERIDKKVEGLSKHIKLEEERRSEDAQSKAALTDWLRAKASFVIEGLKEADKDEFCRCELKLQKWYGDLRGKPFAIEAENSILDISGFSKQYNCAFIWQKDGVKKLNLYLIINYFKGGKLRFKKIKPEAFEANRFYTVINKKSGEIVPMEVNFNFDDPNLIILPLAFGKRQGREFIWNDLLSLETGSLKLANGRVIEKTLYNRRTRQDEPALFVALTFERREVLDSSNIKPMNLIGVDRGENIPAVIALTDPEGCPLSRFKDSLGNPTHILRIGESYKEKQRTIQAKKEVEQRRAGGYSRKYASKAKNLADDMVRNTARDLLYYAVTQDAMLIFENLSRGFGRQGKRTFMAERQYTRMEDWLTAKLAYEGLPSKTYLSKTLAQYTSKTCSNCGFTITSADYDRVLEKLKKTATGWMTTINGKELKVEGQITYYNRYKRQNVVKDLSVELDRLSEESVNNDISSWTKGRSGEALSLLKKRFSHRPVQEKFVCLNCGFETHADEQAALNIARSWLFLRSQEYKKYQTNKTTGNTDKRAFVETWQSFYRKKLKEVWKPAV

SEQ ID NO: 40901 - protein, 979 aa, Artificial Sequence
  CasX variant
QEIKRINKIRRRLVKDSNTKKAGKTGPMKTLLVRVMTPDLRERLENLRKKPENIPQPISNTSRANLNKLLTDYTEMKKAILHVYWEEFQKDPVGLMSRVAQPASKKIDQNKLKPEMDEKGNLTTAGFACSQCGQPLFVYKLEQVSEKGKAYTNYFGRCNVAEHEKLILLAQLKPEKDSDEAVTYSLGKFGQRALDFYSIHVTKESTHPVKPLAQIAGNRYASGPVGKALSDACMGTIASFLSKYQDIIIEHQKVVKGNQKRLESLRELAGKENLEYPSVTLPPQPHTKEGVDAYNEVIARVRMWVNLNLWQKLKLSRDDAKPLLRLKGFPSFPLVERQANEVDWWDMVCNVKKLINEKKEDGKVFWQNLAGYKRQEALRPYLSSEEDVRKKGKKFARYQLGDLLLHLEKKHGEDWGKVYDEAWERIDKKVEGLSKHIKLEEERRSEDAQSKAALTDWLRAKASFVIEGLKEADKDEFCRCELKLQKWYGDLRGKPFAIEAENSILDISGFSKQYNCAFIWQKDGVKKLNLYLIINYFKGGKLRFKKIKPEAFEANRFYTVINKKSGEIVPMEVNFNFDDPNLIILPLAFGKRQGREFIWNDLLSLETGSLKLANGRVIEKTLYNRRTRQDEPALFVALTFERREVLDSSNIKPMNLIGVDRGENIPAVIALTDPEGCPLSRFKDSLGNPTHILRIGESYKEKQRTIQAKKEVEQRRAGGYSRKYASKAKNLADDMVRNTARDLLYYAVTQDAMLIFENLSRGFGRQGKRTFMAERQYTRMEDWLTAKLAYEGLPSKTYLSKTLAQYTSKTCSNCGFTITSADYDRVLEKLKKTATGWMTTINGKELKVEGQITYYNRYKRQNVVKDLSVELDRLSEESVNNDISSWTKGRSGEALSLLKKRFSHRPVQEKFVCLNCGFETHADEQAALNIARSWLFLRSQEYKKYQTNKTTGNTDKRAFVETWQSFYRKKLKEVWKPAV

SEQ ID NO: 40902 - protein, 978 aa, Artificial Sequence
  CasX variant
QEIKRINKIRRRLVKDSNTKKAGKTGPMKTLLVRVMTPDLRERLENLRKKPENIPQPISNTSRANLNKLLTDYTEMKKAILHVYWEEFQKDPVGLMSRVAQPASKKIDQNKLKPEMDEKGNLTTAGFACSQCGQPLFVYKLEQVSEKGKAYTNYFGRCNVAEHEKLILLAQLKPEKDSDEAVTYSLGKFGQRALDFYSIHVTKESTHPVKPLAQIAGNRYASGPVGKALSDACMGTIASFLSKYQDIIIEHQKVVKGNQKRLESLRELAGKENLEYPSVTLPPQPHTKEGVDAYNEVIARVRMWVNLNLWQKLKLSRDDAKPLLRLKGFPSFPLVERQANEVDWWDMVCNVKKLINEKKEDGKVFWQNLAGYKRQEALRPYLSSEEDREKGKKFARYQLGDLLLHLEKKHGEDWGKVYDEAWERIDKKVEGLSKHIKLEEERRSEDAQSKAALTDWLRAKASFVIEGLKEADKDEFCRCELKLQKWYGDLRGKPFAIEAENSILDISGFSKQYNCAFIWQKDGVKKLNLYLIINYFKGGKLRFKKIKPEAFEANRFYTVINKKSGEIVPMEVNFNFDDPNLIILPLAFGKRQGREFIWNDLLSLETGSLKLANGRVIEKTLYNRRTRQDEPALFVALTFERREVLDSSNIKPMNLIGVDRGENIPAVIALTDPEGCPLSRFKDSLGNPTHILRIGESYKEKQRTIQAKKEVEQRRAGGYSRKYASKAKNLADDMVRNTARDLLYYAVTQDAMLIFENLSRGFGRQGKRTFMAERQYTRMEDWLTAKLAYEGLPSKTYLSKTLAQYTSKTCSNCGFTITSADYDRVLEKLKKTATGWMTTINGKELKVEGQITYYNRYKRQNVVKDLSVELDRLSEESVNNDISSWTKGRSGEALSLLKKRFSHRPVQEKFVCLNCGFETHADEQAALNIARSWLFLRSQEYKKYQTNKTTGNTDKRAFVETWQSFYRKKLKEVWKPAV

SEQ ID NO: 40903 - protein, 979 aa, Artificial Sequence
  CasX variant
QEIKRINKIRRRLVKDSNTKKAGKTGPMKTLLVRVMTPDLRERLENLRKKPENIPQPISNTSRANLNKLLTDYTEMKKAILHVYWEEFQKDPVGLMSRVAQPASKKIDQNKLKPEMDEKGNLTTAGFACSQCGQPLFVYKLEQVSEKGKAYTNYFGRCNVAEHEKLILLAQLKPEKDSDEAVTYSLGKFGQRALDFYSIHVTKESTHPVKPLAQIAGNRYASGPVGKALSDACMGTIASFLSKYQDIIIEHQKVVKGNQKRLESLRELAGKENLEYPSVTLPPQPHTKEGVDAYNEVIARVRMWVNLNLWQKLKLSRDDAKPLLRLKGFPSFPLVERQANEVDWWDMVCNVKKLINEKKEDGKVFWQNLAGYKRQEALRPYLSSEEDRKKGKKFARYQLGDLLLHLEKKHGEDWGKVYDEAWERIDKKVEGLSKHIKLEEERRSEDAQSKAALTDWLRAKASFVIEGLKEADKDEMFCRCELKLQKWYGDLRGKPFAIEAENSILDISGFSKQYNCAFIWQKDGVKKLNLYLIINYFKGGKLRFKKIKPEAFEANRFYTVINKKSGEIVPMEVNFNFDDPNLIILPLAFGKRQGREFIWNDLLSLETGSLKLANGRVIEKTLYNRRTRQDEPALFVALTFERREVLDSSNIKPMNLIGVDRGENIPAVIALTDPEGCPLSRFKDSLGNPTHILRIGESYKEKQRTIQAKKEVEQRRAGGYSRKYASKAKNLADDMVRNTARDLLYYAVTQDAMLIFENLSRGFGRQGKRTFMAERQYTRMEDWLTAKLAYEGLPSKTYLSKTLAQYTSKTCSNCGFTITSADYDRVLEKLKKTATGWMTTINGKELKVEGQITYYNRYKRQNVVKDLSVELDRLSEESVNNDISSWTKGRSGEALSLLKKRFSHRPVQEKFVCLNCGFETHADEQAALNIARSWLFLRSQEYKKYQTNKTTGNTDKRAFVETWQSFYRKKLKEVWKPAV

SEQ ID NO: 40904 - protein, 978 aa, Artificial Sequence
  CasX variant
QEIKRINKIRRRLVKDSNTKKAGKTGPMKTLLVRVMTPDLRERLENLRKKPENIPQPISNTSRANLNKLLTDYTEMKKAILHVYWEEFQKDPVGLMSRVAQPASKKIDQNKLKPEMDEKGNLTTAGFACSQCGQPLFVYKLEQVSEKGKAYTNYFGRCNVAEHEKLILLAQLKPEKDSDEAVTYSLGKFGQRALDFYSIHVTKESTHPVKPLAQIAGNRYASGPVGKALSDACMGTIASFLSKYQDIIIEHQKVVKGNQKRLESLRELAGKENLEYPSVTLPPQPHTKEGVDAYNEVIARVRMWVNLNLWQKLKLSRDDAKPLLRLKGFPSFPLVERQANEVDWWDMVCNVKKLINEKKEDGKVFWQNLAGYKRQEALRPYLSSEEDRKKGKKFARYQLGDLLLHLEKKHGEDWGKVYDEAWERIDKKVEGLSKHIKLEEERRSEDAQSKAALTDWLRAKASFVIEGLKEADKDEFCRCELKLQKWYGDLRGKPFAIEAENSILDISGFSKQYNCAFIWQKDGVKKQNLYLIINYFKGGKLRFKKIKPEAFEANRFYTVINKKSGEIVPMEVNFNFDDPNLIILPLAFGKRQGREFIWNDLLSLETGSLKLANGRVIEKTLYNRRTRQDEPALFVALTFERREVLDSSNIKPMNLIGVDRGENIPAVIALTDPEGCPLSRFKDSLGNPTHILRIGESYKEKQRTIQAKKEVEQRRAGGYSRKYASKAKNLADDMVRNTARDLLYYAVTQDAMLIFENLSRGFGRQGKRTFMAERQYTRMEDWLTAKLAYEGLPSKTYLSKTLAQYTSKTCSNCGFTITSADYDRVLEKLKKTATGWMTTINGKELKVEGQITYYNRYKRQNVVKDLSVELDRLSEESVNNDISSWTKGRSGEALSLLKKRFSHRPVQEKFVCLNCGFETHADEQAALNIARSWLFLRSQEYKKYQTNKTTGNTDKRAFVETWQSFYRKKLKEVWKPAV

SEQ ID NO: 40905 - protein, 978 aa, Artificial Sequence
  CasX variant
QEIKRINKIRRRLVKDSNTKKAGKTGPMKTLLVRVMTPDLRERLENLRKKPENIPQPISNTSRANLNKLLTDYTEMKKAILHVYWEEFQKDPVGLMSRVAQPASKKIDQNKLKPEMDEKGNLTTAGFACSQCGQPLFVYKLEQVSEKGKAYTNYFGRCNVAEHEKLILLAQLKPEKDSDEAVTYSLGKFGQRALDFYSIHVTKESTHPVKPLAQIAGNRYASGPVGKALSDACMGTIASFLSKYQDIIIEHQKVVKGNQKRLESLRELAGKENLEYPSVTLPPQPHTKEGVDAYNEVIARVRMWVNLNLWQKLKLSRDDAKPLLRLKGFPSFPLVERQANEVDWWDMVCNVKKLINEKKEDGKVFWQNLAGYKRQEALRPYLSSEEDRKKGKKFARYQLGDLLLHLEKKHGEDWGKVYDEAWERIDKKVEGLSKHIKLEEERRSEDAQSKAALTDWLRAKASFVIEGLKEADKDEFCRCELKLQKWYGDLRGKPFAIEAENSILDISGFSKQYNCAFIWQKDGVKKLNLYLIINYFKGGKLRFKKIKPEAFEANRFYTVINKKSGEIVIMEVNFNFDDPNLIILPLAFGKRQGREFIWNDLLSLETGSLKLANGRVIEKTLYNRRTRQDEPALFVALTFERREVLDSSNIKPMNLIGVDRGENIPAVIALTDPEGCPLSRFKDSLGNPTHILRIGESYKEKQRTIQAKKEVEQRRAGGYSRKYASKAKNLADDMVRNTARDLLYYAVTQDAMLIFENLSRGFGRQGKRTFMAERQYTRMEDWLTAKLAYEGLPSKTYLSKTLAQYTSKTCSNCGFTITSADYDRVLEKLKKTATGWMTTINGKELKVEGQITYYNRYKRQNVVKDLSVELDRLSEESVNNDISSWTKGRSGEALSLLKKRFSHRPVQEKFVCLNCGFETHADEQAALNIARSWLFLRSQEYKKYQTNKTTGNTDKRAFVETWQSFYRKKLKEVWKPAV

SEQ ID NO: 40906 - protein, 978 aa, Artificial Sequence
  CasX variant
QEIKRINKIRRRLVKDSNTKKAGKTGPMKTLLVRVMTPDLRERLENLRKKPENIPQPISNTSRANLNKLLTDYTEMKKAILHVYWEEFQKDPVGLMSRVAQPASKKIDQNKLKPEMDEKGNLTTAGFACSQCGQPLFVYKLEQVSEKGKAYTNYFGRCNVAEHEKLILLAQLKPEKDSDEAVTYSLGKFGQRALDFYSIHVTKESTHPVKPLAQIAGNRYASGPVGKALSDACMGTIASFLSKYQDIIIEHQKVVKGNQKRLESLRELAGKENLEYPSVTLPPQPHTKEGVDAYNEVIARVRMWVNLNLWQKLKLSRDDAKPLLRLKGFPSFPLVERQANEVDWWDMVCNVKKLINEKKEDGKVFWQNLAGYKRQEALRPYLSSEEDRKKGKKFARYQLGDLLLHLEKKHGEDWGKVYDEAWERIDKKVEGLSKHIKLEEERRSEDAQSKAALTDWLRAKASFVIEGLKEADKDEFCRCELKLQKWYGDLRGKPFAIEAENSILDISGFSKQYNCAFIWQKDGVKKLNLYLIINYFKGGKLRFKKIKPEAFEANRFYTVINKKSGEIVPMEVNFNFDDPNLIILPLAFGKRQGREFIWNDLLSLETGSLKLANGRVIEKTLYNRRTRQDEPALFVALTFERREVNDSSNIKPMNLIGVDRGENIPAVIALTDPEGCPLSRFKDSLGNPTHILRIGESYKEKQRTIQAKKEVEQRRAGGYSRKYASKAKNLADDMVRNTARDLLYYAVTQDAMLIFENLSRGFGRQGKRTFMAERQYTRMEDWLTAKLAYEGLPSKTYLSKTLAQYTSKTCSNCGFTITSADYDRVLEKLKKTATGWMTTINGKELKVEGQITYYNRYKRQNVVKDLSVELDRLSEESVNNDISSWTKGRSGEALSLLKKRFSHRPVQEKFVCLNCGFETHADEQAALNIARSWLFLRSQEYKKYQTNKTTGNTDKRAFVETWQSFYRKKLKEVWKPAV

SEQ ID NO: 40907 - protein, 979 aa, Artificial Sequence
  CasX variant
QEIKRINKIRRRLVKDSNTKKAGKTGPMKTLLVRVMTPDLRERLENLRKKPENIPQPISNTSRANLNKLLTDYTEMKKAILHVYWEEFQKDPVGLMSRVAQPASKKIDQNKLKPEMDEKGNLTTAGFACSQCGQPLFVYKLEQVSEKGKAYTNYFGRCNVAEHEKLILLAQLKPEKDSDEAVTYSLGKFGQRALDFYSIHVTKESTHPVKPLAQIAGNRYASGPVGKALSDACMGTIASFLSKYQDIIIEHQKVVKGNQKRLESLRELAGKENLEYPSVTLPPQPHTKEGVDAYNEVIARVRMWVNLNLWQKLKLSRDDAKPLLRLKGFPSFPLVERQANEVDWWDMVCNVKKLINEKKEDGKVFWQNLAGYKRQEALRPYLSSEEDRKKGKKFARYQLGDLLLHLEKKHGEDWGKVYDEAWERIDKKVEGLSKHIKLEEERRSEDAQSKAALTDWLRAKASFVIEGLKEADKDEFCRCELKLQKWYGDLRGKPFAIEAENSILDISGFSKQYNCAFIWQKDGVKKLNLYLIINYFKGGKLRFKKIKPEAFEANRFYTVINKKSGEIVPMEVNFNFDDPNLIILPLAFGKRQGREFIWNDLLSLETGSLKLANGRVIEKTLYNRRTRQDEPALFVALTFERREVLDSSNIKPMNLIGVDRGENIPAVIALTDPEGCPLSRFKDSLGNPTHILRIGESYKEKQRTIQAKKEVEQRRAGGYSRKYASKAKNLADDMVRNTARDLLYYAVTQDAMLIFENLSRGFGRQGKRTFMAERQYTRMEDWLTAKLAYEGLPSGKTYLSKTLAQYTSKTCSNCGFTITSADYDRVLEKLKKTATGWMTTINGKELKVEGQITYYNRYKRQNVVKDLSVELDRLSEESVNNDISSWTKGRSGEALSLLKKRFSHRPVQEKFVCLNCGFETHADEQAALNIARSWLFLRSQEYKKYQTNKTTGNTDKRAFVETWQSFYRKKLKEVWKPAV

SEQ ID NO: 40908 - protein, 978 aa, Artificial Sequence
  CasX variant
QEIKRINKIRRRLVKDSNTKKAGKTGPMKTLLVRVMTPDLRERLENLRKKPENIPQPISNTSRANLNKLLTDYTEMKKAILHVYWEEFQKDPVGLMSRVAQPASKKIDQNKLKPEMDEKGNLTTAGFACSQCGQPLFVYKLEQVSEKGKAYTNYFGRCNVAEHEKLILLAQLKPEKDSDEAVTYSLGKFGQRALDFYSIHVTKESTHPVKPLAQIAGNRYASGPVGKALSDACMGTIASFLSKYQDIIIEHQKVVKGNQKRLESLRELAGKENLEYPSVTLPPQPHTKEGVDAYNEVIARVRMWVNLNLWQKLKLSRDDAKPLLRLKGFPSFPLVERQANEVDWWDMVCNVKKLINEKKEDGKVFWQNLAGYKRQEALRPYLSSEEDRKKGKKFARYQLGDLLLHLEKKHGEDWGKVYDEAWERIDKKVEGLSKHIKLEEERRSEDAQSKAALTDWLRAKASFVIEGLKEADKDEFCRCELKLQKWYGDLRGKPFAIEAENSILDISGFSKQYNCAFIWQKDGVKKLNLYLIINYFKGGKLRFKKIKPEAFEANRFYTVINKKSGEIVPMEVNFNFDDPNLIILPLAFGKRQGREFIWNDLLSLETGSLKLANGRVIEKTLYNRRTRQDEPALFVALTFERREVLDSSNIKPMNLIGVDRGENIPAVIALTDPEGCPLSRFKDSLGNPTHILRIGESYKEKQRTIQAKKEVEQRRAGGYSRKYASKAKNLADDMVRNTARDLLYYAVTQDAMLIFENLSRGFGRQGKRTFMAERQYTRMEDWLTAKLAYEGLPSKTYLSKTLAQYTSKTCSNCGFTITSADYDRMLEKLKKTATGWMTTINGKELKVEGQITYYNRYKRQNVVKDLSVELDRLSEESVNNDISSWTKGRSGEALSLLKKRFSHRPVQEKFVCLNCGFETHADEQAALNIARSWLFLRSQEYKKYQTNKTTGNTDKRAFVETWQSFYRKKLKEVWKPAV

SEQ ID NO: 40909 - protein, 978 aa, Artificial Sequence
  CasX variant
QEIKRINKIRRRLVKDSNTKKAGKTGPMKTLLVRVMTPDLRERLENLRKKPENIPQPISNTSRANLNKLLTDYTEMKKAILHVYWEEFQKDPVGLMSRVAQPASKKIDQNKLKPEMDEKGNLTTAGFACSQCGQPLFVYKLEQVSEKGKAYTNYFGRCNVAEHEKLILLAQLKPEKDSDEAVTYSLGKFGQRALDFYSIHVTKESTHPVKPLAQIAGNRYASGPVGKALSDACMGTIASFLSKYQDIIIEHQKVVKGNQKRLESLRELAGKENLEYPSVTLPPQPHTKEGVDAYNEVIARVRMWVNLNLWQKLKLSRDDAKPLLRLKGFPSFPLVERQANEVDWWDMVCNVKKLINEKKEDGKVFWQNLAGYKRQEALRPYLSSEEDRKKGKKFARYQLGDLLLHLEKKHGEDWGKVYDEAWERIDKKVEGLSKHIKLEEERRSEDAQSKAALTDWLRAKASFVIEGLKEADKDEFCRCELKLQKWYGDLRGKPFAIEAENSILDISGFSKQYNCAFIWQKDGVKKLNLYLIINYFKGGKLRFKKIKPEAFEANRFYTVINKKSGEIVPMEVNFNFDDPNLIILPLAFGKRQGREFIWNDLLSLETGSLKLANGRVIEKTLYNRRTRQDEPALFVALTFERREVLDSSNIKPMNLIGVDRGENIPAVIALTDPEGCPLSRFKDSLGNPTHILRIGESYKEKQRTIQAKKEVEQRRAGGYSRKYASKAKNLADDMVRNTARDLLYYAVTQDAMLIFENLSRGFGRQGKRTFMAERQYTRMEDWLTAKLAYEGLPSKTYLSKTLAQYTSKTCSNCGFTITSADYDRVLEKLKKTATGWMTTINGKELKVEGQITYYNRYKRQNVVKDLSVELDRLSEESVNNDISSWTKGRQGEALSLLKKRFSHRPVQEKFVCLNCGFETHADEQAALNIARSWLFLRSQEYKKYQTNKTTGNTDKRAFVETWQSFYRKKLKEVWKPAV

SEQ ID NO: 40910 - protein, 978 aa, Artificial Sequence
  CasX variant
QEIKRINKIRRRLVKDSNTKKAGKTGPMKTLLVRVMTPDLRERLENLRKKPENIPQPISNTSRANLNKLLTDYTEMKKAILHVYWEEFQKDPVGLMSRVAQPASKKIDQNKLKPEMDEKGNLTTAGFACSQCGQPLFVYKLEQVSEKGKAYTNYFGRCNVAEHEKLILLAQLKPEKDSDEAVTYSLGKFGQRALDFYSIHVTKESTHPVKPLAQIAGNRYASGPVGKALSDACMGTIASFLSKYQDIIIEHQKVVKGNQKRLESLRELAGKENLEYPSVTLPPQPHTKEGVDAYNEVIARVRMWVNLNLWQKLKLSRDDAKPLLRLKGFPSFPLVERQANEVDWWDMVCNVKKLINEKKEDGKVFWQNLAGYKRQEALRPYLSSEEDRKKGKKFARYQLGDLLLHLEKKHGEDWGKVYDEAWERIDKKVEGLSKHIKLEEERRSEDAQSKAALTDWLRAKASFVIEGLKEADKDEFCRCELKLQKWYGDLRGKPFAIEAENSILDISGFSKQYNCAFIWQKDGVKKLNLYLIINYFKGGKLRFKKIKPEAFEANRFYTVINKKSGEIVPMEVNFNFDDPNLIILPLAFGKRQGREFIWNDLLSLETGSLKLANGRVIEKTLYNRRTRQDEPALFVALTFERREVLDSSNIKPMNLIGVDRGENIPAVIALTDPEGCPLSRFKDSLGNPTHILRIGESYKEKQRTIQAKKEVEQRRAGGYSRKYASKAKNLADDMVRNTARDLLYYAVTQDAMLIFENLSRGFGRQGKRTFMAERQYTRMEDWLTAKLAYEGLPSKTYLSKTLAQYTSKTCSNCGFTITSADYDRVLEKLKKTATGWMTTINGKELKVEGQITYYNRYKRQNVVKDLSVELDRLSEESVNNDISSWTKGRSGEALSLLKKRFSHRPVQEKFVCLNCEFETHADEQAALNIARSWLFLRSQEYKKYQTNKTTGNTDKRAFVETWQSFYRKKLKEVWKPAV

SEQ ID NO: 40911 - protein, 979 aa, Artificial Sequence
  CasX variant
QEIKRINKIRRRLVKDSNTKKAGKTGPMKTLLVRVMTPDLRERLENLRKKPENIPQPISNTSRANLNKLLTDYTEMKKAILHVYWEEFQKDPVGLMSRVAQPASKKIDQNKLKPEMDEKGNLTTAGFACSQCGQPLFVYKLEQVSEKGKAYTNYFGRCNVAEHEKLILLAQLKPEKDSDEAVTYSLGKFGQRALDFYSIHVTKESTHPVKPLAQIAGNRYASGPVGKALSDACMGTIASFLSKYQDIIIEHQKVVKGNQKRLESLRELAGKENLEYPSVTLPPQPHTKEGVDAYNEVIARVRMWVNLNLWQKLKLSRDDAKPLLRLKGFPSFPLVERQANEVDWWDMVCNVKKLINEKKEDGKVFWQNLAGYKRQEALRPYLSSEEDRKKGKKFARYQLGDLLLHLEKKHGEDWGKVYDEAWERIDKKVEGLSKHIKLEEERRSEDAQSKAALTDWLRAKASFVIEGLKEADKDEFCRCELKLQKWYGDLRGKPFAIEAENSILDISGFSKQYNCAFIWQKDGVKKLNLYLIINYFKGGKLRFKKIKPEAFEANRFYTVINKKSGEIVPMEVNFNFDDPNLIILPLAFGKRQGREFIWNDLLSLETGSLKLANGRVIEKTLYNRRTRQDEPALFVALTFERREVLDSSNIKPMNLIGVDRGENIPAVIALTDPEGCPLSRFKDSLGNPTHILRIGESYKEKQRTIQAKKEVEQRRAGGYSRKYASKAKNLADDMVRNTARDLLYYAVTQDAMLIFENLSRGFGRQGKRTFMAERQYTRMEDWLTAKLAYEGLPSKTYLSKTLAQYTSKTCSNCGFTITSADYDRVLEKLKKTATGWMTTINGKELKVEGQITYYNRYKRQNVVKDLSVELDRLSEESVNNDISSWTKGRSGEALSLLKKRFSHRPVQEKFVCLNCGFETHADEQAALNIARSWLFLRSQEYKKYQTNKTSTGNTDKRAFVETWQSFYRKKLKEVWKPAV

SEQ ID NO: 40912 - protein, 979 aa, Artificial Sequence
  CasX variant
QEIKRINKIRRRLVKDSNTKKAGKTGPMKTLLVRVMTPDLRERLENLRKKPENIPQPISNTSRANLNKLLTDYTEMKKAILHVYWEEFQKDPVGLMSRVAQPASKKIDQNKLKPEMDEKGNLTTAGFACSQCGQPLFVYKLEQVSEKGKAYTNYFGRCNVAEHEKLILLAQLKPEKDSDEAVTYSLGKFGQRALDFYSIHVTKESTHPVKPLAQIAGNRYASGPVGKALSDACMGTIASFLSKYQDIIIEHQKVVKGNQKRLESLRELAGKENLEYPSVTLPPQPHTKEGVDAYNEVIARVRMWVNLNLWQKLKLSRDDAKPLLRLKGFPSFPLVERQANEVDWWDMVCNVKKLINEKKEDGKVFWQNLAGYKRQEALRPYLSSEEDRKKGKKFARYQLGDLLLHLEKKHGEDWGKVYDEAWERIDKKVEGLSKHIKLEEERRSEDAQSKAALTDWLRAKASFVIEGLKEADKDEFCRCELKLQKWYGDLRGKPFAIEAENSILDISGFSKQYNCAFIWQKDGVKKLNLYLIINYFKGGKLRFKKIKPEAFEANRFYTVINKKSGEIVPMEVNFNFDDPNLIILPLAFGKRQGREFIWNDLLSLETGSLKLANGRVIEKTLYNRRTRQDEPALFVALTFERREVLDSSNIKPMNLIGVDRGENIPAVIALTDPEGCPLSRFKDSLGNPTHILRIGESYKEKQRTIQAKKEVEQRRAGGYSRKYASKAKNLADDMVRNTARDLLYYAVTQDAMLIFENLSRGFGRQGKRTFMAERQYTRMEDWLTAKLAYEGLPSKTYLSKTLAQYTSKTCSNCGFTITSADYDRVLEKLKKTATGWMTTINGKELKVEGQITYYNRYKRQNVVKDLSVELDRLSEESVNNDISSWTKGRSGEALSLLKKRFSHRPVQEKFVCLNCGFETHADEQAALNIARSWLFLRSQEYKKYQTNKTTGKNTDKRAFVETWQSFYRKKLKEVWKPAV

SEQ ID NO: 40913 - RNA, 155 nt, Artificial Sequence
  scaffold variant
acuggcgcuuuuaucugauuacuuugagagccaucaccagcgacuaugucguaguggguaaagcugcacuaugggcgcagcaccugaggaucacccaggugcugacgguacaggccaccugaggaucacccaggugguauagugcagcaucaaag

SEQ ID NO: 40914 - RNA, 155 nt, Artificial Sequence
  scaffold variant
acuggcgcuuuuaucugauuacuuugagagccaucaccagcgacuaugucguaguggguaaagcugcacuaugggcgcagcgcaugaggaucacccaugcgcugacgguacaggccgcaugaggaucacccaugcgguauagugcagcaucaaag

SEQ ID NO: 40915 - RNA, 155 nt, Artificial Sequence
  scaffold variant
acuggcgcuuuuaucugauuacuuugagagccaucaccagcgacuaugucguaguggguaaagcugcacuaugggcgcagcgccugaggaucacccaggcgcugacgguacaggccgccugaggaucacccaggcgguauagugcagcaucaaag

SEQ ID NO: 40916 - RNA, 155 nt, Artificial Sequence
  scaffold variant
acuggcgcuuuuaucugauuacuuugagagccaucaccagcgacuaugucguaguggguaaagcugcacuaugggcgcagcgccugagcaucagccaggcgcugacgguacaggccgccugagcaucagccaggcgguauagugcagcaucaaag

SEQ ID NO: 40917 - RNA, 155 nt, Artificial Sequence
  scaffold variant
acuggcgcuuuuaucugauuacuuugagagccaucaccagcgacuaugucguaguggguaaagcugcacuaugggcgcagcacaugagcaucagccaugugcugacgguacaggccacaugagcaucagccaugugguauagugcagcaucaaag

SEQ ID NO: 40918 - RNA, 155 nt, Artificial Sequence
  scaffold variant
acuggcgcuuuuaucugauuacuuugagagccaucaccagcgacuaugucguaguggguaaagcugcacuaugggcgcagcacaugaguaucaaccaugugcugacgguacaggccacaugaguaucaaccaugugguauagugcagcaucaaag

SEQ ID NO: 40919 - RNA, 155 nt, Artificial Sequence
  scaffold variant
acuggcgcuuuuaucugauuacuuugagagccaucaccagcgacuaugucguaguggguaaagcugcacuaugggcgcagcacaugagaaucagccaugugcugacgguacaggccacaugagaaucagccaugugguauagugcagcaucaaag

SEQ ID NO: 40920 - RNA, 155 nt, Artificial Sequence
  scaffold variant
acuggcgcuuuuaucugauuacuuugagagccaucaccagcgacuaugucguaguggguaaagcugcacuaugggcgcagcccuugaggaucacccaugugcugacgguacaggccccuugaggaucacccaugugguauagugcagcaucaaag

SEQ ID NO: 40921 - RNA, 155 nt, Artificial Sequence
  scaffold variant
acuggcgcuuuuaucugauuacuuugagagccaucaccagcgacuaugucguaguggguaaagcugcacuaugggcgcagcacuugaggaucacccaugugcugacgguacaggccacuugaggaucacccaugugguauagugcagcaucaaag

SEQ ID NO: 40922 - RNA, 155 nt, Artificial Sequence
  scaffold variant
acuggcgcuuuuaucugauuacuuugagagccaucaccagcgacuaugucguaguggguaaagcugcacuaugggcgcagcaccugaggaucacccaugugcugacgguacaggccaccugaggaucacccaugugguauagugcagcaucaaag

SEQ ID NO: 40923 - RNA, 155 nt, Artificial Sequence
  scaffold variant
acuggcgcuuuuaucugauuacuuugagagccaucaccagcgacuaugucguaguggguaaagcugcacuaugggcgcagcacaugaggaucaccuaugugcugacgguacaggccacaugaggaucaccuaugugguauagugcagcaucaaag

SEQ ID NO: 40924 - RNA, 155 nt, Artificial Sequence
  scaffold variant
acuggcgcuuuuaucugauuacuuugagagccaucaccagcgacuaugucguaguggguaaagcugcacuaugggcgcagcacauuaggaucaccaaugugcugacgguacaggccacauuaggaucaccaaugugguauagugcagcaucaaag

SEQ ID NO: 40925 - RNA, 155 nt, Artificial Sequence
  scaffold variant
acuggcgcuuuuaucugauuacuuugagagccaucaccagcgacuaugucguaguggguaaagcugcacuaugggcgcagcacauuaggaucaccgaugugcugacgguacaggccacauuaggaucaccgaugugguauagugcagcaucaaag

SEQ ID NO: 40926 - RNA, 155 nt, Artificial Sequence
  scaffold variant
acuggcgcuuuuaucugauuacuuugagagccaucaccagcgacuaugucguaguggguaaagcugcacuaugggcgcagcacauuaggaucaccuaugugcugacgguacaggccacauuaggaucaccuaugugguauagugcagcaucaaag

SEQ ID NO: 40927 - RNA, 155 nt, Artificial Sequence
  scaffold variant
acuggcgcuuuuaucugauuacuuugagagccaucaccagcgacuaugucguaguggguaaagcugcacuaugggcgcagcacaugaggauuacccaugugcugacgguacaggccacaugaggauuacccaugugguauagugcagcaucaaag

SEQ ID NO: 40928 - RNA, 155 nt, Artificial Sequence
  scaffold variant
acuggcgcuuuuaucugauuacuuugagagccaucaccagcgacuaugucguaguggguaaagcugcacuaugggcgcagcacaugaggauaacccaugugcugacgguacaggccacaugaggauaacccaugugguauagugcagcaucaaag

SEQ ID NO: 40929 - RNA, 155 nt, Artificial Sequence
  scaffold variant
acuggcgcuuuuaucugauuacuuugagagccaucaccagcgacuaugucguaguggguaaagcugcacuaugggcgcagcacaugaggaugacccaugugcugacgguacaggccacaugaggaugacccaugugguauagugcagcaucaaag

SEQ ID NO: 40930 - RNA, 155 nt, Artificial Sequence
  scaffold variant
acuggcgcuuuuaucugauuacuuugagagccaucaccagcgacuaugucguaguggguaaagcugcacuaugggcgcagcacaugaggaccacccaugugcugacgguacaggccacaugaggaccacccaugugguauagugcagcaucaaag

SEQ ID NO: 40931 - RNA, 155 nt, Artificial Sequence
  scaffold variant
acuggcgcuuuuaucugauuacuuugagagccaucaccagcgacuaugucguaguggguaaagcugcacuaugggcgcagcagaugaggaucacccaugggcugacgguacaggccagaugaggaucacccaugggguauagugcagcaucaaag

SEQ ID NO: 40932 - RNA, 155 nt, Artificial Sequence
  scaffold variant
acuggcgcuuuuaucugauuacuuugagagccaucaccagcgacuaugucguaguggguaaagcugcacuaugggcgcagcacauggggaucacccaugugcugacgguacaggccacauggggaucacccaugugguauagugcagcaucaaag

SEQ ID NO: 40933 - RNA, 155 nt, Artificial Sequence
  scaffold variant
acuggcgcuuuuaucugauuacuuugagagccaucaccagcgacuaugucguaguggguaaagcugcacuaugggcgcagcacaugaggaucacccaugugcugacgguacaggccacaugaggaucacccaugugguauagugcagcaucaaag

SEQ ID NO: 40934 - RNA, 96 nt, Artificial Sequence
  scaffold variant
acuggcgcuuuuaucugauuacuuugagagccaucaccagcgacuaugucguaguggguaaagcucaccugaggaucacccaggugagcaucaaag

SEQ ID NO: 40935 - RNA, 96 nt, Artificial Sequence
  scaffold variant
acuggcgcuuuuaucugauuacuuugagagccaucaccagcgacuaugucguaguggguaaagcucgcaugaggaucacccaugcgagcaucaaag

SEQ ID NO: 40936 - RNA, 96 nt, Artificial Sequence
  scaffold variant
acuggcgcuuuuaucugauuacuuugagagccaucaccagcgacuaugucguaguggguaaagcucgccugaggaucacccaggcgagcaucaaag

SEQ ID NO: 40937 - RNA, 96 nt, Artificial Sequence
  scaffold variant
acuggcgcuuuuaucugauuacuuugagagccaucaccagcgacuaugucguaguggguaaagcucgccugagcaucagccaggcgagcaucaaag

SEQ ID NO: 40938 - RNA, 96 nt, Artificial Sequence
  scaffold variant
acuggcgcuuuuaucugauuacuuugagagccaucaccagcgacuaugucguaguggguaaagcucacaugagcaucagccaugugagcaucaaag

SEQ ID NO: 40939 - RNA, 96 nt, Artificial Sequence
  scaffold variant
acuggcgcuuuuaucugauuacuuugagagccaucaccagcgacuaugucguaguggguaaagcucacaugaguaucaaccaugugagcaucaaag

SEQ ID NO: 40940 - RNA, 96 nt, Artificial Sequence
  scaffold variant
acuggcgcuuuuaucugauuacuuugagagccaucaccagcgacuaugucguaguggguaaagcucacaugagaaucagccaugugagcaucaaag

SEQ ID NO: 40941 - RNA, 96 nt, Artificial Sequence
  scaffold variant
acuggcgcuuuuaucugauuacuuugagagccaucaccagcgacuaugucguaguggguaaagcucccuugaggaucacccaugugagcaucaaag

SEQ ID NO: 40942 - RNA, 96 nt, Artificial Sequence
  scaffold variant
acuggcgcuuuuaucugauuacuuugagagccaucaccagcgacuaugucguaguggguaaagcucacuugaggaucacccaugugagcaucaaag

SEQ ID NO: 40943 - RNA, 96 nt, Artificial Sequence
  scaffold variant
acuggcgcuuuuaucugauuacuuugagagccaucaccagcgacuaugucguaguggguaaagcucaccugaggaucacccaugugagcaucaaag

SEQ ID NO: 40944 - RNA, 96 nt, Artificial Sequence
  scaffold variant
acuggcgcuuuuaucugauuacuuugagagccaucaccagcgacuaugucguaguggguaaagcucacaugaggaucaccuaugugagcaucaaag

SEQ ID NO: 40945 - RNA, 96 nt, Artificial Sequence
  scaffold variant
acuggcgcuuuuaucugauuacuuugagagccaucaccagcgacuaugucguaguggguaaagcucacauuaggaucaccaaugugagcaucaaag

SEQ ID NO: 40946 - RNA, 96 nt, Artificial Sequence
  scaffold variant
acuggcgcuuuuaucugauuacuuugagagccaucaccagcgacuaugucguaguggguaaagcucacauuaggaucaccgaugugagcaucaaag

SEQ ID NO: 40947 - RNA, 96 nt, Artificial Sequence
  scaffold variant
acuggcgcuuuuaucugauuacuuugagagccaucaccagcgacuaugucguaguggguaaagcucacauuaggaucaccuaugugagcaucaaag

SEQ ID NO: 40948 - RNA, 96 nt, Artificial Sequence
  scaffold variant
acuggcgcuuuuaucugauuacuuugagagccaucaccagcgacuaugucguaguggguaaagcucacaugaggauuacccaugugagcaucaaag

SEQ ID NO: 40949 - RNA, 96 nt, Artificial Sequence
  scaffold variant
acuggcgcuuuuaucugauuacuuugagagccaucaccagcgacuaugucguaguggguaaagcucacaugaggauaacccaugugagcaucaaag

SEQ ID NO: 40950 - RNA, 96 nt, Artificial Sequence
  scaffold variant
acuggcgcuuuuaucugauuacuuugagagccaucaccagcgacuaugucguaguggguaaagcucacaugaggaugacccaugugagcaucaaag

SEQ ID NO: 40951 - RNA, 96 nt, Artificial Sequence
  scaffold variant
acuggcgcuuuuaucugauuacuuugagagccaucaccagcgacuaugucguaguggguaaagcucacaugaggaccacccaugugagcaucaaag

SEQ ID NO: 40952 - RNA, 96 nt, Artificial Sequence
  scaffold variant
acuggcgcuuuuaucugauuacuuugagagccaucaccagcgacuaugucguaguggguaaagcucagaugaggaucacccaugggagcaucaaag

SEQ ID NO: 40953 - RNA, 96 nt, Artificial Sequence
  scaffold variant
acuggcgcuuuuaucugauuacuuugagagccaucaccagcgacuaugucguaguggguaaagcucacauggggaucacccaugugagcaucaaag

SEQ ID NO: 40954 - RNA, 96 nt, Artificial Sequence
  scaffold variant
acuggcgcuucuaucugauuacucugagcgccaucaccagcgacuaugucguaguggguaaagcucacaugaggaucacccaugugagcaucagag

SEQ ID NO: 40955 - RNA, 145 nt, Artificial Sequence
  scaffold variant
acuggcgcuucuaucugauuacucugagcgccaucaccagcgacuaugucguaguggguaaagcugcacuaugggcgcagcgucaaugacgcugacgguacaggccacaugaggaucacccaugugguauagugcagcaucagag

SEQ ID NO: 40956 - RNA, 155 nt, Artificial Sequence
  scaffold variant
acuggcgcuucuaucugauuacucugagcgccaucaccagcgacuaugucguaguggguaaagcugcacuaugggcgcagcucaugaggaucacccaugagcugacgguacaggccacaugaggaucacccaugugguauagugcagcaucagag

SEQ ID NO: 40957 - RNA, 159 nt, Artificial Sequence
  scaffold variant
acuggcgcuucuaucugauuacucugagcgccaucaccagcgacuaugucguaguggguaaagcugcacuaugggcgcagacauggcagucguaacgacgcgggucugacgguacaggccacaugaggaucacccaugugguauagugcagcaucagag

SEQ ID NO: 40958 - RNA, 145 nt, Artificial Sequence
  scaffold variant
acuggcgcuuuuaucugauuacuuugagagccaucaccagcgacuaugucguaguggguaaagcugcacuauggggccacaugaggaucacccaugugguguacagcgcagcgucaaugacgcugacgauagugcagcaucaaag

SEQ ID NO: 40959 - protein, 977 aa, Artificial Sequence; identical to SEQ ID NO: 72
  CasX variant

SEQ ID NO: 40960 - protein, 977 aa, Artificial Sequence; identical to SEQ ID NO: 130
  CasX variant

SEQ ID NO: 40961 - protein, 976 aa, Artificial Sequence; identical to SEQ ID NO: 131
  CasX variant

SEQ ID NO: 40962 - protein, 976 aa, Artificial Sequence; identical to SEQ ID NO: 132
  CasX variant

SEQ ID NO: 40963 - protein, 976 aa, Artificial Sequence; identical to SEQ ID NO: 133
  CasX variant

SEQ ID NO: 40964 - protein, 976 aa, Artificial Sequence; identical to SEQ ID NO: 134
  CasX variant

SEQ ID NO: 40965 - protein, 977 aa, Artificial Sequence; identical to SEQ ID NO: 135
  CasX variant

SEQ ID NO: 40966 - protein, 977 aa, Artificial Sequence; identical to SEQ ID NO: 136
  CasX variant

SEQ ID NO: 40967 - protein, 977 aa, Artificial Sequence; identical to SEQ ID NO: 137
  CasX variant

SEQ ID NO: 40968 - protein, 977 aa, Artificial Sequence; identical to SEQ ID NO: 138
  CasX variant

SEQ ID NO: 40969 - protein, 986 aa, Artificial Sequence; identical to SEQ ID NO: 56
  CasX variant

SEQ ID NO: 40970 - protein, 978 aa, Artificial Sequence; identical to SEQ ID NO: 142
  CasX variant

SEQ ID NO: 40971 - protein, 972 aa, Artificial Sequence; identical to SEQ ID NO: 143
  CasX variant

SEQ ID NO: 40972 - protein, 978 aa, Artificial Sequence; identical to SEQ ID NO: 145
  CasX variant

SEQ ID NO: 40973 - protein, 978 aa, Artificial Sequence; identical to SEQ ID NO: 40030
  CasX variant

SEQ ID NO: 40974 - protein, 979 aa, Artificial Sequence; identical to SEQ ID NO: 40162
  CasX variant

SEQ ID NO: 40975 - protein, 978 aa, Artificial Sequence; identical to SEQ ID NO: 40165
  CasX variant

SEQ ID NO: 40976 - protein, 979 aa, Artificial Sequence; identical to SEQ ID NO: 40169
  CasX variant

SEQ ID NO: 40977 - protein, 997 aa, Artificial Sequence; identical to SEQ ID NO: 258
  CasX 387 construct

SEQ ID NO: 40978 - protein, 1005 aa, Artificial Sequence; identical to SEQ ID NO: 259
  CasX 395 construct

SEQ ID NO: 40979 - protein, 996 aa, Artificial Sequence; identical to SEQ ID NO: 260
  CasX 485 construct

SEQ ID NO: 40980 - protein, 996 aa, Artificial Sequence; identical to SEQ ID NO: 261
  CasX 486 construct

SEQ ID NO: 40981 - protein, 996 aa, Artificial Sequence; identical to SEQ ID NO: 262
  CasX 487 construct

SEQ ID NO: 40982 - protein, 997 aa, Artificial Sequence; identical to SEQ ID NO: 263
  CasX 488 construct

SEQ ID NO: 40983 - protein, 997 aa, Artificial Sequence; identical to SEQ ID NO: 264
  CasX 489 construct

SEQ ID NO: 40984 - protein, 997 aa, Artificial Sequence; identical to SEQ ID NO: 265
  CasX 490 construct

SEQ ID NO: 40985 - protein, 997 aa, Artificial Sequence; identical to SEQ ID NO: 266
  CasX 491 construct

SEQ ID NO: 40986 - protein, 54 aa, Artificial Sequence
  CasX domain sequence
EKRINKIRKKLSADNATKPVSRSGPMKTLLVRVMTDDLKKRLEKRRKKPEVMPQ

SEQ ID NO: 40987 - protein, 44 aa, Artificial Sequence
  CasX domain sequence
VISNNAANNLRMLLDDYTKMKEAILQVYWQEFKDDHVGLMCKFA

SEQ ID NO: 40988 - protein, 91 aa, Artificial Sequence
  CasX domain sequence
QPASKKIDQNKLKPEMDEKGNLTTAGFACSQCGQPLFVYKLEQVSEKGKAYTNYFGRCNVAEHEKLILLAQLKPEKDSDEAVTYSLGKFGQ

SEQ ID NO: 40989 - protein, 141 aa, Artificial Sequence
  CasX domain sequence
RALDFYSIHVTKESTHPVKPLAQIAGNRYASGPVGKALSDACMGTIASFLSKYQDIIIEHQKVVKGNQKRLESLRELAGKENLEYPSVTLPPQPHTKEGVDAYNEVIARVRMWVNLNLWQKLKLSRDDAKPLLRLKGFPSF

SEQ ID NO: 40990 - protein, 177 aa, Artificial Sequence
  CasX domain sequence
PVVERRENEVDWWNTINEVKKLIDAKRDMGRVFWSGVTAEKRNTILEGYNYLPNENDHKKREGSLENPKKPAKRQFGDLLLYLEKKYAGDWGKVFDEAWERIDKKIAGLTSHIEREEARNAEDAQSKAVLTDWLRAKASFVLERLKEMDEKEFYACEIQLQKWYGDLRGNPFAVEAE

SEQ ID NO: 40991 - protein, 151 aa, Artificial Sequence
  CasX domain sequence
NRVVDISGFSIGSDGHSIQYRNLLAWKYLENGKREFYLLMNYGKKGRIRFTDGTDIKKSGKWQGLLYGGGKAKVIDLTFDPDDEQLIILPLAFGTRQGREFIWNDLLSLETGLIKLANGRVIEKTIYNKKIGRDEPALFVALTFERREVVD

SEQ ID NO: 40992 - protein, 164 aa, Artificial Sequence
  CasX domain sequence
PSNIKPVNLIGVDRGENIPAVIALTDPEGCPLPEFKDSSGGPTDILRIGEGYKEKQRAIQAAKEVEQRRAGGYSRKFASKSRNLADDMVRNSARDLFYHAVTHDAVLVFENLSRGFGRQGKRTFMTERQYTKMEDWLTAKLAYEGLTSKTYLSKTLAQYTSKTC

SEQ ID NO: 40993 - protein, 110 aa, Artificial Sequence
  CasX domain sequence
SNCGFTITTADYDGMLVRLKKTSDGWATTLNNKELKAEGQITYYNRYKRQTVEKELSAELDRLSEESGNNDISKWTKGRRDEALFLLKKRFSHRPVQEQFVCLDCGHEVH

SEQ ID NO: 40994 - protein, 53 aa, Artificial Sequence
  CasX domain sequence
ADEQAALNIARSWLFLNSNSTEFKSYKSGKQPFVGAWQAFYKRRLKEVWKPNA

SEQ ID NO: 40995 - protein, 56 aa, Artificial Sequence
  CasX domain sequence
QEIKRINKIRRRLVKDSNTKKAGKTGPMKTLLVRVMTPDLRERLENLRKKPENIPQ

SEQ ID NO: 40996 - protein, 44 aa, Artificial Sequence
  CasX domain sequence
PISNTSRANLNKLLTDYTEMKKAILHVYWEEFQKDPVGLMSRVA

SEQ ID NO: 40997 - protein, 90 aa, Artificial Sequence
  CasX domain sequence
QPAPKNIDQRKLIPVKDGNERLTSSGFACSQCCQPLYVYKLEQVNDKGKPHTNYFGRCNVSEHERLILLSPHKPEANDELVTYSLGKFGQ

SEQ ID NO: 40998 - protein, 141 aa, Artificial Sequence
  CasX domain sequence
RALDFYSIHVTRESNHPVKPLEQIGGNSCASGPVGKALSDACMGAVASFLTKYQDIILEHQKVIKKNEKRLANLKDIASANGLAFPKITLPPQPHTKEGIEAYNNVVAQIVIWVNLNLWQKLKIGRDEAKPLQRLKGFPSF

SEQ ID NO: 40999 - protein, 168 aa, Artificial Sequence
  CasX domain sequence
PLVERQANEVDWWDMVCNVKKLINEKKEDGKVFWQNLAGYKRQEALLPYLSSEEDRKKGKKFARYQFGDLLLHLEKKHGEDWGKVYDEAWERIDKKVEGLSKHIKLEEERRSEDAQSKAALTDWLRAKASFVIEGLKEADKDEFCRCELKLQKWYGDLRGKPFAIEAE

SEQ ID NO: 41000 - protein, 146 aa, Artificial Sequence
  CasX domain sequence
NSILDISGFSKQYNCAFIWQKDGVKKLNLYLIINYFKGGKLRFKKIKPEAFEANRFYTVINKKSGEIVPMEVNFNFDDPNLIILPLAFGKRQGREFIWNDLLSLETGSLKLANGRVIEKTLYNRRTRQDEPALFVALTFERREVLD

SEQ ID NO: 41001 - protein, 164 aa, Artificial Sequence
  CasX domain sequence
SSNIKPMNLIGIDRGENIPAVIALTDPEGCPLSRFKDSLGNPTHILRIGESYKEKQRTIQAAKEVEQRRAGGYSRKYASKAKNLADDMVRNTARDLLYYAVTQDAMLIFENLSRGFGRQGKRTFMAERQYTRMEDWLTAKLAYEGLPSKTYLSKTLAQYTSKTC

SEQ ID NO: 41002 - protein, 110 aa, Artificial Sequence
  CasX domain sequence
SNCGFTITSADYDRVLEKLKKTATGWMTTINGKELKVEGQITYYNRYKRQNVVKDLSVELDRLSEESVNNDISSWTKGRSGEALSLLKKRFSHRPVQEKFVCLNCGFETH

SEQ ID NO: 41003 - protein, 58 aa, Artificial Sequence
  CasX domain sequence
ADEQAALNIARSWLFLRSQEYKKYQTNKTTGNTDKRAFVETWQSFYRKKLKEVWKPAV

SEQ ID NO: 41004 - protein, 168 aa, Artificial Sequence
  CasX domain sequence
PLVERQANEVDWWDMVCNVKKLINEKKEDGKVFWQNLAGYKRQEALRPYLSSEEDRKKGKKFARYQLGDLLLHLEKKHGEDWGKVYDEAWERIDKKVEGLSKHIKLEEERRSEDAQSKAALTDWLRAKASFVIEGLKEADKDEFCRCELKLQKWYGDLRGKPFAIEAE

SEQ ID NO: 41005 - protein, 164 aa, Artificial Sequence
  CasX domain sequence
SSNIKPMNLIGVDRGENIPAVIALTDPEGCPLSRFKDSLGNPTHILRIGESYKEKQRTIQAKKEVEQRRAGGYSRKYASKAKNLADDMVRNTARDLLYYAVTQDAMLIFENLSRGFGRQGKRTFMAERQYTRMEDWLTAKLAYEGLPSKTYLSKTLAQYTSKTC

SEQ ID NO: 41006 - protein, 977 aa, Artificial Sequence; identical to SEQ ID NO: 40809
  dCasX variant

SEQ ID NO: 41007 - protein, 979 aa, Artificial Sequence
  dCasX variant
QEIKRINKIRRRLVKDSNTKKAGKTRGPMKTLLVRVMTPDLRERLENLRKKPENIPQPISNTSRANLNKLLTDYTEMKKAILHVYWEEFQKDPVGLMSRVAQPASKKIDQNKLKPEMDEKGNLTTAGFACSQCGQPLFVYKLEQVSEKGKAYTNYFGRCNVAEHEKLILLAQLKPEKDSDEAVTYSLGKFGQRALDFYSIHVTKESTHPVKPLAQIAGNRYASSPVGKALSDACMGTIASFLSKYQDIIIEHQKVVKGNQKRLESLRELAGKENLEYPSVTLPPQPHTKEGVDAYNEVIARVRMWVNLNLWQKLKLSRDDAKPLLRLKGFPSFPLVERQANEVDWWDMVCNVKKLINEKKEDGKVFWQNLAGYKRQEALRPYLSSEEDRKKGKKFARYQLGDLLLHLEKKHGEDWGKVYDEAWERIDKKVEGLSKHIKLEEERRSEDAQSKAALTDWLRAKASFVIEGLKEADKDEFCRCELKLQKWYGDLRGKPFAIEAENSILDISGFSKQYNCAFIWQKDGVKKLNLYLIINYFKGGKLRFKKIKPEAFEANRFYTVINKKSGEIVPMEVNFNFDDPNLIILPLAFGKRQGREFIWNDLLSLETGSLKLANGRVIEKTLYNRRTRQDEPALFVALTFERREVLDSSNIKPMNLIGVARGENIPAVIALTDPEGCPLSRFKDSLGNPTHILRIGESYKEKQRTIQAKKEVEQRRAGGYSRKYASKAKNLADDMVRNTARDLLYYAVTQDAMLIFANLSRGFGRQGKRTFMAERQYTRMEDWLTAKLAYEGLPSKTYLSKTLAQYTSKTCSNCGFTITSADYDRVLEKLKKTATGWMTTINGKELKVEGQITYYNRYKRQNVVKDLSVELDRLSEESVNNDISSWTKGRSGEALSLLKKRFSHRPVQEKFVCLNCGFETHAAEQAALNIARSWLFLRSQEYKKYQTNKTTGNTDKRAFVETWQSFYRKKLKEVWKPAV

SEQ ID NO: 41008 - protein, 972 aa, Artificial Sequence
  dCasX variant
QEIKRINKIRRRLVKDSNTKKAGKTRGPMKTLLVRVMTPDLRERLENLRKKPENIPQPISNTSRANLNKLLTDYTEMKKAILHVYWEEFQKDPVGLMSRVAQPASKKIDQNKLKPEMDEKGNLTTAGFACSQCGQPLFVYKLEQVSEKGKAYTNYFGRCNVAEHEKLILLAQLKPEKDSDEAVTYSLGKFGQRALDFYSIHVTKESTHPVKPLAQIAGNRYASGPVGKALSDACMGTIASFLSKYQDIIIEHQKVVKGNQKRLESLRELAGKENLEYPSVTLPPQPHTKEGVDAYNEVIARVRMWVNLNLWQKLKLSRDDAKPLLRLKGFPSFPLVERQANEVDWWDMVCNVKKLINEKKEDGKVFWQNLAGYKRQEALRPYLSSEEDRKKGKKFARYQLGDLLLHLEKKHGEDWGKVYDEAWERIDKKVEGLSKHIKLEEERRSEDAQSKAALTDWLRAKASFVIEGLKEADKDEFCRCELKLQKWYGDLRGKPFAIEAENSILDISGFSKQYNCAFIWQKDGVKKLNLYLIINYFKGGKLRFKKIKPEAFEANRFYTVINKKSGEIVPMEVNFNFDDPNLIILPLAFGKRQGREFIWNDLLSLETGSLKLANGRVIEKTLYNRRTRQDEPALFVALTFERREVLDSSNIKPMNLIGVARGENIPAVIALTDPEGCPLSRFKDSLGNPTHILRIGESYKEKQRTIQAKKEVEQRRAGGYSRKYASKAKNLADDMVRNTARDLLYYAVTQDAMLIFANLSRGFGRQGKRTFMAERQYTRMEDWLTAKLAYEGLSKTYLSKTLAQYTSKTCSNCGFTITSADYDRVLEKLKKTATGWMTTINGKELKVEGQITYYNRYKRQNVVKDLSVELDRLSEESVNNDISSWTKGRSGEALSLLKKRFSHRPVQEKFVCLNCGFETHAAEQAALNIARSWLFLRSQEYKKYQTNKTTGNTDKRAFVETWQSFYRKKLKE

SEQ ID NO: 41009 - protein, 979 aa, Artificial Sequence
  dCasX variant
QEIKRINKIRRRLVKDSNTKKAGKTRGPMKTLLVRVMTPDLRERLENLRKKPENIPQPISNTSRANLNKLLTDYTEMKKAILHVYWEEFQKDPVGLMSRVAQPASKKIDQNKLKPEMDEKGNLTTAGFACSQCGQPLFVYKLEQVSEKGKAYTNYFGRCNVAEHEKLIKLAQLKPEKDSDEAVTYSLGKFGQRALDFYSIHVTKESTHPVKPLAQIAGNRYASSPVGKALSDACMGTIASFLSKYQDIIIEHQKVVKGNQKRLESLRELAGKENLEYPSVTLPPQPHTKEGVDAYNEVIARVRMWVNLNLWQKLKLSRDDAKPLLRLKGFPSFPLVERQANEVDWWDMVCNVKKLINEKKEDGKVFWQNLAGYKRQEALRPYLSSEEDRKKGKKFARYQLGDLLLHLEKKHGEDWGKVYDEAWERIDKKVEGLSKHIKLEEERRSEDAQSKAALTDWLRAKASFVIEGLKEADKDEFCRCELKLQKWYGDLRGKPFAIEAENSILDISGFSKQYNCAFIWQKDGVKKLNLYLIINYFKGGKLRFKKIKPEAFEANRFYTVINKKSGEIVPMEVNFNFDDPNLIILPLAFGKRQGREFIWNDLLSLETGSLKLANGRVIEKTLYNRRTRQDEPALFVALTFERREVLDSSNIKPMNLIGVARGENIPAVIALTDPEGCPLSRFKDSLGNPTHILRIGESYKEKQRTIQAKKEVEQRRAGGYSRKYASKAKNLADDMVRNTARDLLYYAVTQDAMLIFANLSRGFGRQGKRTFMAERQYTRMEDWLTAKLAYEGLPSKTYLSKTLAQYTSKTCSNCGFTITSADYDRVLEKLKKTATGWMTTINGKELKVEGQITYYNRYKRQNVVKDLSVELDRLSEESVNNDISSWTKGRSGEALSLLKKRFSHRPVQEKFVCLNCGFETHAAEQAALNIARSWLFLRSQEYKKYQTNKTTGNTDKRAFVETWQSFYRKKLKEVWKPAV

SEQ ID NO: 41010 - DNA, 91 bp, Artificial Sequence
  Pol III promoter
atatttgcatgtcgctatgtgttctgggaaatcaccataaacgtgaaatgtctttggatttgggaatcttataagttctgtatgagaccac

SEQ ID NO: 41011 - DNA, 92 bp, Artificial Sequence
  Pol III promoter
atatttagcatgtcgctatgtgttctgggaaatcaccataaacgtgaaatgtctttggatttgggaatcttataagttctgtatgagaccac

SEQ ID NO: 41012 - DNA, 92 bp, Artificial Sequence
  Pol III promoter
atatttgcatgtctgcaaggcattctggatagtcaccataaacgtgaaatgtctttggatttgggaatcttataagttctgtatgagaccac

SEQ ID NO: 41013 - DNA, 91 bp, Artificial Sequence
  Pol III promoter
atatttgcatgtcgctatgtgttctgggaaattgacctaagtgtaaagtgtctttggatttgggaatcttataagttctgtatgagaccac

SEQ ID NO: 41014 - DNA, 91 bp, Artificial Sequence
  Pol III promoter
atatttagcattctgcaaggcattctggatagtgacctaagtgtaaagtgtctttggatttgggaatcttatatattctgtatgagaccac

SEQ ID NO: 41015 - DNA, 92 bp, Artificial Sequence
  Pol III promoter
atatttagcattctgcaaggcattctggatagtcaccataaacgtgaaatgtctttggatttgggaatcttataagttctgtatgagaccac

SEQ ID NO: 41016 - DNA, 91 bp, Artificial Sequence
  Pol III promoter
atatttgcatgtcgctatgtgttctgggaaacttgacctaagtgtaaagttgagatttccttcaggttttataagttctgtatgagaccac

SEQ ID NO: 41017 - DNA, 91 bp, Artificial Sequence
  Pol III promoter
atatttgcatgtcgctatgtgttctgggaaatcaccataaacgtgaaatttgagatttccttcaggttttataagttctgtatgagaccac

SEQ ID NO: 41018 - DNA, 91 bp, Artificial Sequence
  Pol III promoter
atatttgcatgtcgctatgtgttctgggaaacttgacctaagtgtaaagttgagatttccttcaggtttatatagttctgtatgagaccac

SEQ ID NO: 41019 - DNA, 92 bp, Artificial Sequence
  Pol III promoter
atatttagcatgtcgctatgtgttctgggaaacttgacctaagtgtaaagttgagatttccttcaggtttatatagttctgtatgagaccac

SEQ ID NO: 41020 - DNA, 91 bp, Artificial Sequence
  Pol III promoter
atatttgcatgatttcccatgattccttcattcaccataaacgtgaaatgtctttggatttgggaatcttataagttctgtatgagaccac

SEQ ID NO: 41021 - DNA, 94 bp, Artificial Sequence
  Pol III promoter
atatttgcatgtcgctatgtgttctgggaaatcttaccgtaacttgaaagtagtctttggatttgggaatcttataagttctgtatgagaccac

SEQ ID NO: 41022 - DNA, 92 bp, Artificial Sequence
  Pol III promoter
atatttgcatatttcccatgattccttcatcttaccgtaacttgaaagtagtctttggatttgggaatcttatatattctgtatgagaccac

SEQ ID NO: 41023 - DNA, 90 bp, Artificial Sequence
  Pol III promoter
atatttgcatatttcccatgattccttcattcaccataaacgtgaaatgtctttggatttgggaatcttataagttctgtatgagaccac

SEQ ID NO: 41024 - DNA, 94 bp, Artificial Sequence
  Pol III promoter
atatttgcatgtcgctatgtgttctgggaaactcttaccgtaacttgaaagtatgagatttccttcaggttttataagttctgtatgagaccac

SEQ ID NO: 41025 - DNA, 94 bp, Artificial Sequence
  Pol III promoter
atatttgcatgtcgctatgtgttctgggaaactcttaccgtaacttgaaagtatgagatttccttcaggtttatatagttctgtatgagaccac

SEQ ID NO: 41026 - DNA, 249 bp, Artificial Sequence
  Pol III promoter
gccacctcttttgcatattggcacccacaatccaccgcggctatgaggccagtataaggcggtaaaattacgataagatatgggattttacgtgatcgaagacatcaaagtaagcgtaagcacgaaagttgttctgcaacataccactgtaggaaattatgctaaatatgaaaccgaccataagttatcctaaccaaaagatgatttgattgaagggcttaaaataggtgtgacagtaacccttgagtc

SEQ ID NO: 41027 - DNA, 249 bp, Artificial Sequence
  Pol III promoter
tcccttacccagggtgccccgggcgctcatttgcatgtcccacccaacaggtaaacctgacagatcggtcgcggccaggtacggcctggcggtcagagcaccaaacttacgagccttgtgatgagttccgttacatgaaattctcctaaaggctccaagatggacaggaaagcgctcgattcggttaccgtaaggaaaacaaatgagaaactcccgtgccttataagacctggggacggacttatttgc

SEQ ID NO: 41028 - DNA, 249 bp, Artificial Sequence
  Pol III promoter
cccttacccagggtgccccgggcgctcatttgcatgtcccacccaacaggtaaacctgacaggtcatcgcggccaggtacgacctggcggtcagagcaccaaacatacgagccttgtgatgagttccgttgcatgaaattctcccaaaggctccaagatggacaggaaagggcgcggttcggtcaccgtaagtagaataggtgaaagactcccgtgccttataaggcctgtgggtgacttcttctcaac

SEQ ID NO: 41029 - DNA, 249 bp, Artificial Sequence
  Pol III promoter
caggctctgccccgcctccggggctatttgcatacgaccatttccagtaattcccagcagccaccgtagctatatttggtagaacaacgagcactttctcaactccagtcaataactacgttagttgcattacacattgggctaatataaatagaggttaaatctctaggtcatttaagagaagtcggcctatgtgtacagacatttgttccaggggctttaaatagctggtggtggaactcaatattc

SEQ ID NO: 41030 - DNA, 400 bp, Artificial Sequence; identical to SEQ ID NO: 40371
  UbC protein promoter variant

SEQ ID NO: 41031 - DNA, 164 bp, Artificial Sequence; identical to SEQ ID NO: 40394
  Jet protein promoter variant

SEQ ID NO: 41032 - DNA, 252 bp, Artificial Sequence
  U1a protein promoter variant
aatggaggcggtactatgtagatgagaattcaggagcaaactgggaaaagcaactgcttccaaatatttgtgatttttacagtgtagttttggaaaaactcttagcctaccaattcttctaagtgttttaaaatgtgggagccagtacacatgaagttatagagtgttttaatgaggcttaaatatttaccgtaactatgaaatgctacgcatatcatgctgttcaggctccgtggccacgcaactcatact

SEQ ID NO: 41033 - DNA, 229 bp, Artificial Sequence; identical to SEQ ID NO: 40384
  MeP426 protein promoter variant

SEQ ID NO: 41034 - DNA, 38 bp, Artificial Sequence
  MiniCMV protein promoter variant
gtaggcgtgtacggtgggaggtctatataagcagagct

SEQ ID NO: 41035 - DNA, 354 bp, Artificial Sequence
  SFCp protein promoter variant
ggatcctactgacgaggggcttgtccaaacaagcccgggcatgcctaaacatgccctgatgcaatcctgacgtcgtgaagcaatgattatgcaatttgagcatgtccagactagccctgacggatgacgcttgacgcaattcctgaggcaagtctgagcttgttcaaacttgtcttgaagaaattatgacggactgacgtatggtgcaatattggggcaatgcttgacgttcgcggtaggcgtgtacggtgggaggtctatataagcagagctcgtttagtgaaccgtcagatcgcctggagacgccatccacgctgttttgacctccatagaagtcaccgggaccgatccagc

SEQ ID NO: 41036 - DNA, 197 bp, Artificial Sequence
  miniSV40 protein promoter variant
tgcatctcaattagtcagcaaccatagtcccgcccctaactccgcccatcccgcccctaactccgcccagttccgcccattctccgccccatggctgactaattttttttatttatgcagaggccgaggccgcctcggcctctgagctattccagaagtagtgaggaggcttttttggaggcctaggcttttgcaaa

SEQ ID NO: 41037 - DNA, 178 bp, Artificial Sequence
  pJB42CAT5 protein promoter variant
ctgacaaattcagtataaaagcttggggctggggccgagcactggggactttgagggtggccaggccagcgtaggaggccagcgtaggatcctgctgggagcggggaactgagggaagcgacgccgagaaagcaggcgtaccacggagggagagaaaagctccggaagcccagcagcg

SEQ ID NO: 41038 - DNA, 41 bp, Artificial Sequence
  MLP protein promoter variant
ggggggctataaaagggggtgggggcgttcgtcctcactct

SEQ ID NO: 41039 - DNA, 204 bp, Artificial Sequence; identical to SEQ ID NO: 40400
  CMV core protein promoter variant

SEQ ID NO: 41040 - DNA, 234 bp, Artificial Sequence; identical to SEQ ID NO: 40372
  EFS protein promoter variant

SEQ ID NO: 41041 - DNA, 212 bp, Artificial Sequence
  miniEF1alpha protein promoter variant
gggcagagcgcacatcgcccacagtccccgagaagttggggggaggggtcggcaattgatccggtgcctagagaaggtggcgcggggtaaactgggaaagtgatgtcgtgtactggctccgcctttttcccgagggtgggggagaaccgtatataagtgcagtagtcgccgtgaacgttctttttcgcaacgggtttgccgccagaacacag

SEQ ID NO: 41042 - DNA, 325 bp, Artificial Sequence; identical to SEQ ID NO: 40396
  hRPL30 protein promoter variant

SEQ ID NO: 41043 - DNA, 243 bp, Artificial Sequence; identical to SEQ ID NO: 40397
  hRPS18 protein promoter variant

SEQ ID NO: 41044 - DNA, 223 bp, Artificial Sequence
  hRPL13a protein promoter variant
acagcgctgaccgcggaggtccaaccggaagaatgtccggattggacattcggaagagggcccgccttccctggggaatctctgcgcacgcgcagaacgcttcgaccaatgaaaacacaggaagccgtccgcgcaaccgcgttgcgtcacttctgccgcccctgtttcaagggataagaaaccctgcgacaaaacctcctccttttccaagcggctgccgaag

SEQ ID NO: 41045 - DNA, 400 bp, Artificial Sequence
  CpG-depleted UbC promoter
accaagtgacgatcacagctatccacaaacaagaactgcgacccaaatcccggctgcgacggaactagctgtgccacacccggcgcgtccttatataatcatcggcgttcaccgccccaaggagatccctccgcagaatcgccgagaagggactacttttcctcgcctgttccgctctctggaaagaaaaccagtgccctagagtcacccaagtcccgtcctaaaatgtccttctgctgatactggggttctaaggctgagtcttatgagcagcgggctgctgtcctgagcgtccaggcggaaggatcaggaggctcgctgcgcccttcgtctgacgtggcagcgctcgccgtgaggaggggggcgcccgcgggaggcgccaaaacccggtgcggaggcc

SEQ ID NO: 41046 - DNA, 400 bp, Artificial Sequence
  Strongly CpG-depleted UbC promoter
accaagtgatgatcacagctatccacaaacaagaactgagacccaaatcccagctgccacggaactagctgtgccacacccggtgtctccttatataatcataggaattcaccgccccaaggagatccctccgcagaattgccgagaagggactacttttcctagcctgttccactctctggaaagaaaaccagtgccctagagtcacccaagtcccttcctaaaatgtccttctgctgatactggggttctaaggctgagtcttatgagcagagggctgctgtcctgagggtccaggcggaaggatcaggaggctcactgagcccttcgtctgacgtggcagatctggccgtgaggaggggggaacccgcgggaggcaccaaaacccggtggggaggcc

SEQ ID NO: 41047 - DNA, 400 bp, Artificial Sequence
  CpG-free UbC promoter
accaagtgatgatcacagctatccacaaacaagaactgagacccaaatcccagctgccatggaactagctgtgccacacctggtgtctccttatataatcataggaattcactgccccaaggagatccctctgcagaattgctgagaagggactacttttcctagcctgttccactctctggaaagaaaaccagtgccctagagtcacccaagtcccttcctaaaatgtccttctgctgatactggggttctaaggctgagtcttatgagcagagggctgctgtcctgagggtccaggtggaaggatcaggaggctcactgagccctttgtctgatgtggcagatctggctgtgaggaggggggaacctgtgggaggcaccaaaacctggtggggaggcc

SEQ ID NO: 41048 - DNA, 252 bp, Artificial Sequence
  CpG-depleted U1a promoter
aatggaggcggtactatgtagatgagaattcaggagcaaactgggaaaagcaactgcttccaaatatttgtgatttttacagtgtagttttggaaaaactcttagcctaccaattcttctaagtgttttaaaatgtgggagccagtacacatgaagttatagagtgttttaatgaggcttaaatatttaccgtaactatgaaatgctacacatatcatgctgttcaggctctgtggccatgcaactcatact

SEQ ID NO: 41049 - DNA, 252 bp, Artificial Sequence
  CpG-free U1a promoter
aatggaggtggtactatgtagatgagaattcaggagcaaactgggaaaagcaactgcttccaaatatttgtgatttttacagtgtagttttggaaaaactcttagcctaccaattcttctaagtgttttaaaatgtgggagccagtacacatgaagttatagagtgttttaatgaggcttaaatatttactgtaactatgaaatgctacacatatcatgctgttcaggctctgtggccatgcaactcatact

SEQ ID NO: 41050 - DNA, 241 bp, Artificial Sequence
  CpG-depleted U6 promoter
gagggcctatttcccatgattccttcatatttgcatatacgatacaaggctgttagagagataattggaattaatttgactgtaaacacaaagatattagtacaaaatatttgatgtagaaagtaataatttcttgggtagtttgcagttttaaaattatgttttaaaatggactatcatatgcttaccgtaacttgaaagtatttctatttcttggctttatatatcttgtggaaaggac

SEQ ID NO: 41051 - DNA, 241 bp, Artificial Sequence
  CpG-free U6 promoter
gagggcctatttcccatgattccttcatatttgcatatacaatacaaggctgttagagagataattggaattaatttgactgtaaacacaaagatattagtacaaaatatttgatgtagaaagtaataatttcttgggtagtttgcagttttaaaattatgttttaaaatggactatcatatgcttaccataacttgaaagtatttctatttcttggctttatatatcttgtggaaaggac

SEQ ID NO: 41052 - DNA, 3006 bp, Artificial Sequence
  CpG-free cMycNLS-Stx491-cMycNLS
atggctccagctgccaagagagtgaagctggactctagacaagagatcaagaggatcaacaagattagaagaaggctggtcaaggacagcaacaccaagaaggcaggcaagacaggccccatgaagaccctgcttgtcagagtgatgacccctgacctgagagagagactggaaaacctgagaaagaagcctgagaacatccctcagcctatctccaacaccagcagagccaacctgaacaagctgctgacagactacacagagatgaagaaagccatcctgcatgtgtactgggaagagttccagaaagaccctgtgggcctgatgagcagagtggcccagcctgccagcaagaagattgaccagaacaaactgaagccagagatggatgagaagggcaacctgaccacagctggctttgcctgctctcagtgtggccagcctctgtttgtgtacaagctggaacaagtgtctgagaaaggcaaggcctacaccaactactttggcagatgcaatgtggctgagcatgagaagctgatcctgctggcccagctgaagcctgaaaaggactctgatgaggctgtgacctacagcctgggcaagtttggacagagagccctggacttctacagcatccatgtgaccaaagaaagcacacaccctgtgaagcccctggctcagattgctggcaacagatatgcctctggacctgtgggcaaagccctgtctgatgcctgcatgggaaccattgccagctttctgagcaagtaccaggacatcatcattgagcaccagaaagtggtcaaggggaaccagaagaggctggaatctctgagagagctggctggcaaagagaacctggaatacccctctgtgaccctgcctcctcagcctcacaccaaagagggtgttgatgcctacaatgaagtgattgccagagtcaggatgtgggtcaacctgaatctgtggcagaagctgaagctgagcagggatgatgccaagcctctgctgagactgaagggcttccctagcttcccactggtggaaaggcaggctaatgaagtggattggtgggacatggtctgcaatgtgaagaaactgatcaatgagaagaaagaggatggcaaggttttctggcagaacctggctggctacaagaggcaagaagccctgaggccttacctgtcctctgaggaagataggaagaaggggaagaagtttgccagataccagctgggagatctgctgctgcacctggaaaagaaacatggggaagattggggcaaagtgtatgatgaggcctgggagagaattgacaagaaggtggaaggcctgagcaagcacattaagctggaagaggaaagaagatctgaggatgcccagagcaaggctgccctgactgattggctgagagccaaggccagctttgtgattgagggcctgaaagaggctgacaaggatgagttctgtagatgtgaactgaagctgcaaaagtggtatggggacctgaggggcaagccctttgccattgaggcagagaacagcatcctggacatcagtggcttcagcaagcagtacaactgtgccttcatttggcagaaggatggggttaagaagctcaacctgtacctgatcatcaactacttcaaaggtggcaagctgaggttcaagaagatcaagccagaggcctttgaggccaacaggttctacacagtgatcaacaaaaagtctggggagattgtgcccatggaagtgaacttcaactttgatgatcccaacctcatcatcctgccactggcctttggcaagagacagggcagagaattcatctggaatgacctgctgagcctggaaacaggcagcctgaaactggccaatggcagagtgattgagaaaaccctgtacaacagaaggaccagacaggatgagcctgcactgtttgtggccctgacctttgagagaagggaagtgctggatagcagcaacatcaagcccatgaacctgattggagtggacagaggggagaatatccctgctgtcattgccctgacagaccctgagggctgtcccctgagcagattcaaggactccctgggcaaccccacacacattctgagaattggggagagctacaaagagaagcagagaaccatccaggccaagaaagaagtggaacagaggagagctggaggctactctaggaagtatgccagcaaagccaagaatctggctgatgacatggtcagaaacacagccagggacctgctgtactatgctgtgacccaggatgccatgctgatctttgagaatctgagcagaggatttgggagacaaggcaagaggaccttcatggctgaaagacagtacaccaggatggaagattggctgactgccaaactggcctatgagggactgagcaagacctacctgtccaagacactggcccagtatacctccaagacctgcagcaattgtggcttcaccatcacctctgcagactatgacagagtgctggaaaagctcaagaaaacagccacaggctggatgaccaccatcaatgggaaagagctgaaggttgagggccagatcacctactacaacagatacaaaaggcagaatgtggttaaggacctgtctgtggaactggacagactgtctgaggaatctgtgaacaatgacatcagcagctggaccaagggcagatctggggaagctctgagcctgctgaagaagagattcagccacagacctgtgcaagagaagtttgtgtgtctgaactgtggctttgagacacatgctgatgaacaggctgctctgaacattgccagaagctggctgttcctgagaagccaagagtacaagaagtaccagaccaacaagaccacaggcaacactgacaagagggcctttgtggaaacctggcagagcttctacagaaagaaactcaaagaagtctggaagcctgctgtgggcagccctgcagctaaaagggtcaagctggactga

SEQ ID NO: 41053 - DNA, 208 bp, Artificial Sequence
  CpG-free bGH-polyA sequence
ctgtgccttctagttgccagccatctgttgtttgcccctccccagtgccttccttgaccctggaaggtgccactcccactgtcctttcctaataaaatgaggaaattgcatcacattgtctgagtaggtgtcattctattctggggggtggggtggggcaggacagcaagggggaggattgggaagagaatagcaggcatgctgggga

SEQ ID NO: 41054 - DNA, 129 bp, Artificial Sequence
  CpG-free 5' ITR
tgctcactcactcactcactgaggcctgcagagcaaagctctgcagtctggggacctttggtccccaggcctcagtgagtgagtgagtgagcagagagggagtggccaactccatcactaggggttcct

SEQ ID NO: 41055 - DNA, 131 bp, Artificial Sequence
  CpG-free 3' ITR
tctgctcactcactcactcactgaggcctgcagagcaaagctctgcagtctggggacctttggtccccaggcctcagtgagtgagtgagtgagcagagagggagtggccaactccatcactaggggttcct

SEQ ID NO: 41056 - DNA, 20 bp, Artificial Sequence
  HTT spacer
agtccctcaagtccttccag

SEQ ID NO: 41057 - DNA, 20 bp, Artificial Sequence
  HTT spacer
agcagcagcagcagcagcag

SEQ ID NO: 41058 - DNA, 20 bp, Artificial Sequence
  HTT spacer
tcagccgccgccgcaggcac

SEQ ID NO: 41059 - DNA, 20 bp, Artificial Sequence
  HTT spacer
agggtcgccatggcggtctc

SEQ ID NO: 41060 - DNA, 20 bp, Artificial Sequence
  HTT spacer
tcagcttttccagggtcgcc

SEQ ID NO: 41061 - DNA, 20 bp, Artificial Sequence
  HTT spacer
ctatgaaggcctttaacaaa

SEQ ID NO: 41062 - DNA, 20 bp, Artificial Sequence
  HTT spacer
gccgcagccgcccccgccgc

SEQ ID NO: 41063 - DNA, 20 bp, Artificial Sequence
  HTT spacer
gccacagccgggccgggtgg

SEQ ID NO: 41064 - DNA, 20 bp, Artificial Sequence
  HTT spacer
tcagccacagccgggccggg

SEQ ID NO: 41065 - DNA, 20 bp, Artificial Sequence
  HTT spacer
cggtcggtgcagcggctcct

SEQ ID NO: 41066 - DNA, 20 bp, Artificial Sequence
  HTT spacer
tgccgggcgggagaccgcca

SEQ ID NO: 41067 - DNA, 20 bp, Artificial Sequence
  HTT spacer
gaccctggaaaagctgatga

SEQ ID NO: 41068 - DNA, 20 bp, Artificial Sequence
  HTT spacer
gctgctgctggaaggacttg

SEQ ID NO: 41069 - DNA, 20 bp, Artificial Sequence
  HTT spacer
ggcggcggcggcggcggcgg

SEQ ID NO: 41070 - DNA, 20 bp, Artificial Sequence
  HTT spacer
ggcggcggctgaggaagctg

SEQ ID NO: 41071 - DNA, 20 bp, Artificial Sequence
  HTT spacer
tgtgcctgcggcggcggctg

SEQ ID NO: 41072 - DNA, 20 bp, Artificial Sequence
  HTT spacer
ggcggcggcgggggcggctg

SEQ ID NO: 41073 - DNA, 20 bp, Artificial Sequence
  HTT spacer
ccgccgcccccgccgccacc

SEQ ID NO: 41074 - DNA, 23 bp, Artificial Sequence
  HTT spacer
tcgaaggccttcatcagcttttc

SEQ ID NO: 41075 - DNA, 23 bp, Artificial Sequence
  HTT spacer
cctggaaaagctgatgaaggcct

SEQ ID NO: 41076 - DNA, 23 bp, Artificial Sequence
  HTT spacer
gcggctcctcagccacagccggg

SEQ ID NO: 41077 - DNA, 23 bp, Artificial Sequence
  HTT spacer
gctgaggagccgctgcaccgacc

SEQ ID NO: 41078 - DNA, 20 bp, Artificial Sequence
  HTT spacer
tctactgtgtgcacttcatc

SEQ ID NO: 41079 - DNA, 20 bp, Artificial Sequence
  HTT spacer
tccactgtgtgcacttcatc

SEQ ID NO: 41080 - DNA, 20 bp, Artificial Sequence
  HTT spacer
ctcatctactgtgtgcactt

SEQ ID NO: 41081 - DNA, 20 bp, Artificial Sequence
  HTT spacer
ctcatccactgtgtgcactt

SEQ ID NO: 41082 - DNA, 20 bp, Artificial Sequence
  HTT spacer
agcacatagaggacgccgtg

SEQ ID NO: 41083 - DNA, 20 bp, Artificial Sequence
  HTT spacer
agcacatagaggatgccgtg

SEQ ID NO: 41084 - DNA, 20 bp, Artificial Sequence
  HTT spacer
gtgcccttgtgccctgcctc

SEQ ID NO: 41085 - DNA, 20 bp, Artificial Sequence
  HTT spacer
gcgcccttgtgccctgcctc

SEQ ID NO: 41086 - DNA, 20 bp, Artificial Sequence
  HTT spacer
gcaggtggtgaccttgtgga

SEQ ID NO: 41087 - DNA, 20 bp, Artificial Sequence
  HTT spacer
taaacaagtcagcagccggt

SEQ ID NO: 41088 - DNA, 20 bp, Artificial Sequence
  HTT spacer
ttgaaaagaaaaccttaccg

SEQ ID NO: 41089 - DNA, 20 bp, Artificial Sequence
  HTT spacer
ttgaaaagaaaaccttaccg

SEQ ID NO: 41090 - DNA, 20 bp, Artificial Sequence
  HTT spacer
tttcaacgaaaagcagcccc

SEQ ID NO: 41091 - DNA, 20 bp, Artificial Sequence
  HTT spacer
tttcaatgaaaagcagcccc

SEQ ID NO: 41092 - DNA, 20 bp, Artificial Sequence
  HTT spacer
acgaaaagcagcccccaagc

SEQ ID NO: 41093 - DNA, 20 bp, Artificial Sequence
  HTT spacer
atgaaaagcagcccccaagc

SEQ ID NO: 41094 - DNA, 20 bp, Artificial Sequence
  HTT spacer
tagcttgaacttccccttta

SEQ ID NO: 41095 - DNA, 20 bp, Artificial Sequence
  HTT spacer
tagcttgaatttccccttta

SEQ ID NO: 41096 - DNA, 20 bp, Artificial Sequence
  HTT spacer
aatacaatgtccagcacaca

SEQ ID NO: 41097 - DNA, 20 bp, Artificial Sequence
  HTT spacer
aatacaatgtccagtacaca

SEQ ID NO: 41098 - DNA, 20 bp, Artificial Sequence
  HTT spacer
tggtaatttgtgtttgtgtg

SEQ ID NO: 41099 - DNA, 20 bp, Artificial Sequence
  HTT spacer
tggtaatttgtgtttgtgta

SEQ ID NO: 41100 - DNA, 20 bp, Artificial Sequence
  HTT spacer
tcccagtgagaaagatcaag

SEQ ID NO: 41101 - DNA, 20 bp, Artificial Sequence
  HTT spacer
ccccagtgagaaagatcaag

SEQ ID NO: 41102 - DNA, 20 bp, Artificial Sequence
  HTT spacer
cactgggatgaactagcagc

SEQ ID NO: 41103 - DNA, 20 bp, Artificial Sequence
  HTT spacer
cactggggtgaactagcagc

SEQ ID NO: 41104 - DNA, 20 bp, Artificial Sequence
  HTT spacer
agctagtaacgatgctaacg

SEQ ID NO: 41105 - DNA, 20 bp, Artificial Sequence
  HTT spacer
agcgagtaacgatgctaacg

SEQ ID NO: 41106 - DNA, 20 bp, Artificial Sequence
  HTT spacer
cgcagctaggctaaagagtc

SEQ ID NO: 41107 - DNA, 20 bp, Artificial Sequence
  HTT spacer
cgcagctaggttaaagagtc

SEQ ID NO: 41108 - DNA, 20 bp, Artificial Sequence
  HTT spacer
ttgattgtgtttcttatttg

SEQ ID NO: 41109 - DNA, 20 bp, Artificial Sequence
  HTT spacer
ttgattgtatttcttatttg

SEQ ID NO: 41110 - DNA, 20 bp, Artificial Sequence
  HTT spacer
catcaaataagaaacacaat

SEQ ID NO: 41111 - DNA, 20 bp, Artificial Sequence
  HTT spacer
catcaaataagaaatacaat

SEQ ID NO: 41112 - DNA, 20 bp, Artificial Sequence
  HTT spacer
aaaatacagtatacctcctc

SEQ ID NO: 41113 - DNA, 20 bp, Artificial Sequence
  HTT spacer
aaaatacagtatgcctcctc

SEQ ID NO: 41114 - DNA, 20 bp, Artificial Sequence
  HTT spacer
aacacagaggaggtatactg

SEQ ID NO: 41115 - DNA, 20 bp, Artificial Sequence
  HTT spacer
aacacagaggaggcatactg

SEQ ID NO: 41116 - DNA, 20 bp, Artificial Sequence
  HTT spacer
gattgttaatcataaagtct

SEQ ID NO: 41117 - DNA, 20 bp, Artificial Sequence
  HTT spacer
gattgttaatcataaagtcc

SEQ ID NO: 41118 - DNA, 20 bp, Artificial Sequence
  HTT spacer
agactttatgattaacaatc

SEQ ID NO: 41119 - DNA, 20 bp, Artificial Sequence
  HTT spacer
ggactttatgattaacaatc

SEQ ID NO: 41120 - DNA, 20 bp, Artificial Sequence
  HTT spacer
tcattgcacttccatgttgg

SEQ ID NO: 41121 - DNA, 20 bp, Artificial Sequence
  HTT spacer
tcgttgcacttccatgttgg

SEQ ID NO: 41122 - DNA, 20 bp, Artificial Sequence
  HTT spacer
tttgggatatttgacctgcg

SEQ ID NO: 41123 - DNA, 20 bp, Artificial Sequence
  HTT spacer
tttgggatatttgacctgca

SEQ ID NO: 41124 - DNA, 20 bp, Artificial Sequence
  HTT spacer
gaagagctacaacgcaggtc

SEQ ID NO: 41125 - DNA, 20 bp, Artificial Sequence
  HTT spacer
gaagagctacaatgcaggtc

SEQ ID NO: 41126 - DNA, 20 bp, Artificial Sequence
  HTT spacer
tgttctctctttttctttgg

SEQ ID NO: 41127 - DNA, 20 bp, Artificial Sequence
  HTT spacer
cgttctctctttttctttgg

SEQ ID NO: 41128 - DNA, 20 bp, Artificial Sequence
  HTT spacer
aatggagaatacgggtaaca

SEQ ID NO: 41129 - DNA, 20 bp, Artificial Sequence
  HTT spacer
aatggagaatacaggtaaca

SEQ ID NO: 41130 - DNA, 20 bp, Artificial Sequence
  HTT spacer
aagtagtagttagtaatcaa

SEQ ID NO: 41131 - DNA, 20 bp, Artificial Sequence
  HTT spacer
aagtagtagttagtaaccaa

SEQ ID NO: 41132 - DNA, 20 bp, Artificial Sequence
  HTT spacer
cagcaaataattttggaaag

SEQ ID NO: 41133 - DNA, 20 bp, Artificial Sequence
  HTT spacer
caacaaataattttggaaag

SEQ ID NO: 41134 - DNA, 20 bp, Artificial Sequence
  HTT spacer
aaaattatttgctgtgaatt

SEQ ID NO: 41135 - DNA, 20 bp, Artificial Sequence
  HTT spacer
aaaattatttgttgtgaatt

SEQ ID NO: 41136 - DNA, 20 bp, Artificial Sequence
  HTT spacer
aattcacagcaaataatttt

SEQ ID NO: 41137 - DNA, 20 bp, Artificial Sequence
  HTT spacer
aattcacaacaaataatttt

SEQ ID NO: 41138 - DNA, 20 bp, Artificial Sequence
  HTT spacer
taaacttctaattcacagca

SEQ ID NO: 41139 - DNA, 20 bp, Artificial Sequence
  HTT spacer
taaacttctaattcacaaca

SEQ ID NO: 41140 - DNA, 20 bp, Artificial Sequence
  HTT spacer
ttctcaagttagttttagat

SEQ ID NO: 41141 - DNA, 20 bp, Artificial Sequence
  HTT spacer
ttctcaagttggttttagat

SEQ ID NO: 41142 - DNA, 20 bp, Artificial Sequence
  HTT spacer
caagttagttttagattaga

SEQ ID NO: 41143 - DNA, 20 bp, Artificial Sequence
  HTT spacer
caagttggttttagattaga

SEQ ID NO: 41144 - DNA, 20 bp, Artificial Sequence
  HTT spacer
gtcctttctgcccaccagca

SEQ ID NO: 41145 - DNA, 20 bp, Artificial Sequence
  HTT spacer
gtccttcctgcccaccagca

SEQ ID NO: 41146 - DNA, 20 bp, Artificial Sequence
  HTT spacer
tgcccaccagcacatgcttt

SEQ ID NO: 41147 - DNA, 20 bp, Artificial Sequence
  HTT spacer
tgcccaccagcacatgcttt

SEQ ID NO: 41148 - DNA, 20 bp, Artificial Sequence
  HTT spacer
gcccaccagcacatgctttc

SEQ ID NO: 41149 - DNA, 20 bp, Artificial Sequence
  HTT spacer
gcccaccagcacatgctttc

SEQ ID NO: 41150 - DNA, 20 bp, Artificial Sequence
  HTT spacer
acttgtagattgatttaggg

SEQ ID NO: 41151 - DNA, 20 bp, Artificial Sequence
  HTT spacer
acttgtagattaatttaggg

SEQ ID NO: 41152 - DNA, 20 bp, Artificial Sequence
  HTT spacer
ccctaaatcaatctacaagt

SEQ ID NO: 41153 - DNA, 20 bp, Artificial Sequence
  HTT spacer
ccctaaattaatctacaagt

SEQ ID NO: 41154 - DNA, 20 bp, Artificial Sequence
  HTT spacer
tagtcagtctcgccttacct

SEQ ID NO: 41155 - DNA, 20 bp, Artificial Sequence
  HTT spacer
tagtcagtcttgccttacct

SEQ ID NO: 41156 - DNA, 20 bp, Artificial Sequence
  HTT spacer
cctgctccgcctgcaccatg

SEQ ID NO: 41157 - DNA, 20 bp, Artificial Sequence
  HTT spacer
cctgctccgcctgcaccatg

SEQ ID NO: 41158 - DNA, 20 bp, Artificial Sequence
  HTT spacer
ctaaaaacaaaaacatccat

SEQ ID NO: 41159 - DNA, 20 bp, Artificial Sequence
  HTT spacer
ctagaaacaaaaacatccat

SEQ ID NO: 41160 - DNA, 20 bp, Artificial Sequence
  HTT spacer
agggaatcagaggcaatcat

SEQ ID NO: 41161 - DNA, 20 bp, Artificial Sequence
  HTT spacer
agggaatcagaggcaatcat

SEQ ID NO: 41162 - DNA, 20 bp, Artificial Sequence
  HTT spacer
attgtctgtccccttacccg

SEQ ID NO: 41163 - DNA, 20 bp, Artificial Sequence
  HTT spacer
gttgtctgtccccttacccg

SEQ ID NO: 41164 - DNA, 20 bp, Artificial Sequence
  HTT spacer
ctcacttgcttttctattgt

SEQ ID NO: 41165 - DNA, 20 bp, Artificial Sequence
  HTT spacer
ctcacttgcttttctgttgt

SEQ ID NO: 41166 - DNA, 20 bp, Artificial Sequence
  HTT spacer
tgctgccaagggatgctgac

SEQ ID NO: 41167 - DNA, 20 bp, Artificial Sequence
  HTT spacer
tgctgccaagggatgccgac

SEQ ID NO: 41168 - DNA, 20 bp, Artificial Sequence
  HTT spacer
agcgttgaagtactgtcccc

SEQ ID NO: 41169 - DNA, 20 bp, Artificial Sequence
  HTT spacer
agcgttgaattactgtcccc

SEQ ID NO: 41170 - DNA, 20 bp, Artificial Sequence
  HTT spacer
tctagcgttgaagtactgtc

SEQ ID NO: 41171 - DNA, 20 bp, Artificial Sequence
  HTT spacer
tctagcgttgaattactgtc

SEQ ID NO: 41172 - DNA, 20 bp, Artificial Sequence
  HTT spacer
tcactgaggatgaaatggca

SEQ ID NO: 41173 - DNA, 20 bp, Artificial Sequence
  HTT spacer
tcgctgaggatgaaatggca

SEQ ID NO: 41174 - DNA, 20 bp, Artificial Sequence
  HTT spacer
tcctcagtgaggaaggtgat

SEQ ID NO: 41175 - DNA, 20 bp, Artificial Sequence
  HTT spacer
tcctcagcgaggaaggtgat

SEQ ID NO: 41176 - DNA, 20 bp, Artificial Sequence
  HTT spacer
tcccacagtggtttgcctat

SEQ ID NO: 41177 - DNA, 20 bp, Artificial Sequence
  HTT spacer
tcccaaagtggtttgcctat

SEQ ID NO: 41178 - DNA, 20 bp, Artificial Sequence
  HTT spacer
attgctcccagcattataat

SEQ ID NO: 41179 - DNA, 20 bp, Artificial Sequence
  HTT spacer
attgctcccagcattataac

SEQ ID NO: 41180 - DNA, 20 bp, Artificial Sequence
  HTT spacer
cttcccccgagtccctttgg

SEQ ID NO: 41181 - DNA, 20 bp, Artificial Sequence
  HTT spacer
cttcccctgagtccctttgg

SEQ ID NO: 41182 - DNA, 20 bp, Artificial Sequence
  HTT spacer
cccgagtccctttggctccc

SEQ ID NO: 41183 - DNA, 20 bp, Artificial Sequence
  HTT spacer
cctgagtccctttggctccc

SEQ ID NO: 41184 - DNA, 20 bp, Artificial Sequence
  HTT spacer
atcctgtccccaagttcatc

SEQ ID NO: 41185 - DNA, 20 bp, Artificial Sequence
  HTT spacer
atcctatccccaagttcatc

SEQ ID NO: 41186 - DNA, 20 bp, Artificial Sequence
  HTT spacer
ggtgatgacaatttattaat

SEQ ID NO: 41187 - DNA, 20 bp, Artificial Sequence
  HTT spacer
ggtgatggcaatttattaat

SEQ ID NO: 41188 - DNA, 20 bp, Artificial Sequence
  HTT spacer
cagctatcttctcatcaata

SEQ ID NO: 41189 - DNA, 20 bp, Artificial Sequence
  HTT spacer
cagctaacttctcatcaata

SEQ ID NO: 41190 - DNA, 20 bp, Artificial Sequence
  HTT spacer
tcacagctatcttctcatca

SEQ ID NO: 41191 - DNA, 20 bp, Artificial Sequence
  HTT spacer
tcacagctaacttctcatca

SEQ ID NO: 41192 - DNA, 20 bp, Artificial Sequence
  HTT spacer
tctctttgttctgttgtaat

SEQ ID NO: 41193 - DNA, 20 bp, Artificial Sequence
  HTT spacer
tctgtttgttctgttgtaat

SEQ ID NO: 41194 - DNA, 20 bp, Artificial Sequence
  HTT spacer
ctttgttctgttgtaatttt

SEQ ID NO: 41195 - DNA, 20 bp, Artificial Sequence
  HTT spacer
gtttgttctgttgtaatttt

SEQ ID NO: 41196 - DNA, 20 bp, Artificial Sequence
  HTT spacer
tatccgcctataccatacaa

SEQ ID NO: 41197 - DNA, 20 bp, Artificial Sequence
  HTT spacer
tatccgcctatgccatacaa

SEQ ID NO: 41198 - DNA, 20 bp, Artificial Sequence
  HTT spacer
accttcatatccgcctatac

SEQ ID NO: 41199 - DNA, 20 bp, Artificial Sequence
  HTT spacer
accttcatatccgcctatgc

SEQ ID NO: 41200 - DNA, 20 bp, Artificial Sequence
  HTT spacer
tgagcaatggcgtgagaaac

SEQ ID NO: 41201 - DNA, 20 bp, Artificial Sequence
  HTT spacer
ttagcaatggcgtgagaaac

SEQ ID NO: 41202 - DNA, 20 bp, Artificial Sequence
  HTT spacer
cacgccattgctcaggaaca

SEQ ID NO: 41203 - DNA, 20 bp, Artificial Sequence
  HTT spacer
cacgccattgctaaggaaca

SEQ ID NO: 41204 - DNA, 20 bp, Artificial Sequence
  HTT spacer
tctaccgcatcaacacacta

SEQ ID NO: 41205 - DNA, 20 bp, Artificial Sequence
  HTT spacer
tctaccgcatcaatacacta

SEQ ID NO: 41206 - DNA, 20 bp, Artificial Sequence
  HTT spacer
agaagcctgataaaatctct

SEQ ID NO: 41207 - DNA, 20 bp, Artificial Sequence
  HTT spacer
agaagcctaataaaatctct

SEQ ID NO: 41208 - DNA, 20 bp, Artificial Sequence
  HTT spacer
gtcagcgtcacatacatcag

SEQ ID NO: 41209 - DNA, 20 bp, Artificial Sequence
  HTT spacer
gtcagcgtcacatacattag

SEQ ID NO: 41210 - DNA, 20 bp, Artificial Sequence
  HTT spacer
agtcccaaatctgggtgcta

SEQ ID NO: 41211 - DNA, 20 bp, Artificial Sequence
  HTT spacer
agtcccaaatctgggtgtta

SEQ ID NO: 41212 - DNA, 20 bp, Artificial Sequence
  HTT spacer
gtacacacgtgtccttgaca

SEQ ID NO: 41213 - DNA, 20 bp, Artificial Sequence
  HTT spacer
atacacacgtgtccttgaca

SEQ ID NO: 41214 - DNA, 20 bp, Artificial Sequence
  HTT spacer
gaatgcctcatctggtcaaa

SEQ ID NO: 41215 - DNA, 20 bp, Artificial Sequence
  HTT spacer
gaacgcctcatctggtcaaa

SEQ ID NO: 41216 - DNA, 20 bp, Artificial Sequence
  HTT spacer
cgctgcgccgtttctgcata

SEQ ID NO: 41217 - DNA, 20 bp, Artificial Sequence
  HTT spacer
cgctgtgccgtttctgcata

SEQ ID NO: 41218 - DNA, 20 bp, Artificial Sequence
  HTT spacer
accccggcctcggaaacctt

SEQ ID NO: 41219 - DNA, 20 bp, Artificial Sequence
  HTT spacer
accccggcctcggaaacctt

SEQ ID NO: 41220 - DNA, 20 bp, Artificial Sequence
  HTT spacer
gccagcgcatgtgtcctttc

SEQ ID NO: 41221 - DNA, 20 bp, Artificial Sequence
  HTT spacer
gccagcacatgtgtcctttc

SEQ ID NO: 41222 - DNA, 20 bp, Artificial Sequence
  HTT spacer
ccttgaaaggacacatgcgc

SEQ ID NO: 41223 - DNA, 20 bp, Artificial Sequence
  HTT spacer
ccttgaaaggacacatgtgc

SEQ ID NO: 41224 - DNA, 20 bp, Artificial Sequence
  HTT spacer
tcatcggagagcacaccctg

SEQ ID NO: 41225 - DNA, 20 bp, Artificial Sequence
  HTT spacer
tcatcggagagcacaacctg

SEQ ID NO: 41226 - DNA, 20 bp, Artificial Sequence
  HTT spacer
gttgcgttgatttgattttt

SEQ ID NO: 41227 - DNA, 20 bp, Artificial Sequence
  HTT spacer
gttgcattgatttgattttt

SEQ ID NO: 41228 - DNA, 20 bp, Artificial Sequence
  HTT spacer
gaggttcggtggacacaggc

SEQ ID NO: 41229 - DNA, 20 bp, Artificial Sequence
  HTT spacer
gaggctcggtggacacaggc

SEQ ID NO: 41230 - DNA, 20 bp, Artificial Sequence
  HTT spacer
gtggacacaggcagctgccc

SEQ ID NO: 41231 - DNA, 20 bp, Artificial Sequence
  HTT spacer
gtggacacaggcagctgccc

SEQ ID NO: 41232 - DNA, 20 bp, Artificial Sequence
  HTT spacer
gggtgctggagatatcatgg

SEQ ID NO: 41233 - DNA, 20 bp, Artificial Sequence
  HTT spacer
gggtgctggagatgtcatgg

SEQ ID NO: 41234 - DNA, 20 bp, Artificial Sequence
  HTT spacer
accaattttctatttttgga

SEQ ID NO: 41235 - DNA, 20 bp, Artificial Sequence
  HTT spacer
atcaattttctatttttgga

SEQ ID NO: 41236 - DNA, 20 bp, Artificial Sequence
  HTT spacer
acctctgaaaccccgaaatt

SEQ ID NO: 41237 - DNA, 20 bp, Artificial Sequence
  HTT spacer
acctctgaaaccccaaaatt

SEQ ID NO: 41238 - DNA, 20 bp, Artificial Sequence
  HTT spacer
caaatttcggggtttcagag

SEQ ID NO: 41239 - DNA, 20 bp, Artificial Sequence
  HTT spacer
caaattttggggtttcagag

SEQ ID NO: 41240 - DNA, 20 bp, Artificial Sequence
  HTT spacer
ctatgaaggcctttaacaaa

SEQ ID NO: 41241 - DNA, 20 bp, Artificial Sequence
  HTT spacer
ctgtgaaggcctttaacaaa

SEQ ID NO: 41242 - DNA, 20 bp, Artificial Sequence
  HTT spacer
ggttcgctatgaaggccttt

SEQ ID NO: 41243 - DNA, 20 bp, Artificial Sequence
  HTT spacer
ggttcgctgtgaaggccttt

SEQ ID NO: 41244 - DNA, 20 bp, Artificial Sequence
  HTT spacer
tagcgaacctgaagtcaagc

SEQ ID NO: 41245 - DNA, 20 bp, Artificial Sequence
  HTT spacer
cagcgaacctgaagtcaagc

SEQ ID NO: 41246 - DNA, 20 bp, Artificial Sequence
  HTT spacer
ccctgttagcaaaaacgaag

SEQ ID NO: 41247 - DNA, 20 bp, Artificial Sequence
  HTT spacer
ctctgttagcaaaaacgaag

SEQ ID NO: 41248 - DNA, 20 bp, Artificial Sequence
  HTT spacer
tttttgctaacagggggaaa

SEQ ID NO: 41249 - DNA, 20 bp, Artificial Sequence
  HTT spacer
tttttgctaacagagggaaa

SEQ ID NO: 41250 - DNA, 20 bp, Artificial Sequence
  HTT spacer
cattggatctctcagcccat

SEQ ID NO: 41251 - DNA, 20 bp, Artificial Sequence
  HTT spacer
cattgaatctctcagcccat

SEQ ID NO: 41252 - DNA, 20 bp, Artificial Sequence
  HTT spacer
ggccaaaatcaaagcatctt

SEQ ID NO: 41253 - DNA, 20 bp, Artificial Sequence
  HTT spacer
ggccaacatcaaagcatctt

SEQ ID NO: 41254 - DNA, 20 bp, Artificial Sequence
  HTT spacer
ctaacaaaccccccttctct

SEQ ID NO: 41255 - DNA, 20 bp, Artificial Sequence
  HTT spacer
ctagcaaaccccccttctct

SEQ ID NO: 41256 - DNA, 20 bp, Artificial Sequence
  HTT spacer
gtgctgttctgaagatccag

SEQ ID NO: 41257 - DNA, 20 bp, Artificial Sequence
  HTT spacer
atgctgttctgaagatccag

SEQ ID NO: 41258 - DNA, 20 bp, Artificial Sequence
  HTT spacer
gaacagcacggaaaagtttg

SEQ ID NO: 41259 - DNA, 20 bp, Artificial Sequence
  HTT spacer
gaacagcatggaaaagtttg

SEQ ID NO: 41260 - DNA, 20 bp, Artificial Sequence
  HTT spacer
ccgctcagccttggatgttc

SEQ ID NO: 41261 - DNA, 20 bp, Artificial Sequence
  HTT spacer
tcgctcagccttggatgttc

SEQ ID NO: 41262 - DNA, 20 bp, Artificial Sequence
  HTT spacer
ctcagccttggatgttcttt

SEQ ID NO: 41263 - DNA, 20 bp, Artificial Sequence
  HTT spacer
ctcagccttggatgttcttt

SEQ ID NO: 41264 - DNA, 20 bp, Artificial Sequence
  HTT spacer
tgcatcagctttatttgttc

SEQ ID NO: 41265 - DNA, 20 bp, Artificial Sequence
  HTT spacer
tgcatcagctttatttattc

SEQ ID NO: 41266 - DNA, 20 bp, Artificial Sequence
  HTT spacer
ggccattttgagggttctga

SEQ ID NO: 41267 - DNA, 20 bp, Artificial Sequence
  HTT spacer
ggccattttgaaggttctga

SEQ ID NO: 41268 - DNA, 20 bp, Artificial Sequence
  HTT spacer
aaatggccagaattcccgat

SEQ ID NO: 41269 - DNA, 20 bp, Artificial Sequence
  HTT spacer
aaatggccagaattcccgat

SEQ ID NO: 41270 - DNA, 20 bp, Artificial Sequence
  HTT spacer
actcttatcttgaaaccaat

SEQ ID NO: 41271 - DNA, 20 bp, Artificial Sequence
  HTT spacer
actcttatcttaaaaccaat

SEQ ID NO: 41272 - DNA, 20 bp, Artificial Sequence
  HTT spacer
agataagagttgaaataatt

SEQ ID NO: 41273 - DNA, 20 bp, Artificial Sequence
  HTT spacer
agataagagttgaaataatt

SEQ ID NO: 41274 - DNA, 20 bp, Artificial Sequence
  HTT spacer
tctgtggcagaggggatggc

SEQ ID NO: 41275 - DNA, 20 bp, Artificial Sequence
  HTT spacer
tctgtggcagaggggatggc

SEQ ID NO: 41276 - DNA, 20 bp, Artificial Sequence
  HTT spacer
gtggcagaggggatggctgc

SEQ ID NO: 41277 - DNA, 20 bp, Artificial Sequence
  HTT spacer
gtggcagaggggatggctgc

SEQ ID NO: 41278 - DNA, 20 bp, Artificial Sequence
  HTT spacer
ctcgtggtgacaggtcacag

SEQ ID NO: 41279 - DNA, 20 bp, Artificial Sequence
  HTT spacer
cttgtggtgacaggtcacag

SEQ ID NO: 41280 - DNA, 20 bp, Artificial Sequence
  HTT spacer
cagtttttgcttgagttgta

SEQ ID NO: 41281 - DNA, 20 bp, Artificial Sequence
  HTT spacer
cagtttttgcttgagttgta

SEQ ID NO: 41282 - DNA, 20 bp, Artificial Sequence
  HTT spacer
gaccctaatcctgcagcccc

SEQ ID NO: 41283 - DNA, 20 bp, Artificial Sequence
  HTT spacer
gaccctaatcctgcaacccc

SEQ ID NO: 41284 - DNA, 20 bp, Artificial Sequence
  HTT spacer
catgaagcaaagcaagcctc

SEQ ID NO: 41285 - DNA, 20 bp, Artificial Sequence
  HTT spacer
cacgaagcaaagcaagcctc

SEQ ID NO: 41286 - DNA, 20 bp, Artificial Sequence
  HTT spacer
tgagaacctagaccttgctg

SEQ ID NO: 41287 - DNA, 20 bp, Artificial Sequence
  HTT spacer
tgagaacctagaccttgctg

SEQ ID NO: 41288 - DNA, 20 bp, Artificial Sequence
  HTT spacer
tggttttgacatggacgcga

SEQ ID NO: 41289 - DNA, 20 bp, Artificial Sequence
  HTT spacer
tggttttgacatggacacga

SEQ ID NO: 41290 - DNA, 20 bp, Artificial Sequence
  PCSK9 spacer
gaggaggacggcctggccga

SEQ ID NO: 41291 - DNA, 20 bp, Artificial Sequence
  PCSK9 spacer
accgctgcgccaaggtgcgg

SEQ ID NO: 41292 - DNA, 20 bp, Artificial Sequence
  PCSK9 spacer
atggccttcttcctggcttc

SEQ ID NO: 41293 - DNA, 20 bp, Artificial Sequence
  PCSK9 spacer
gccaggccgtcctcctcgga

SEQ ID NO: 41294 - DNA, 20 bp, Artificial Sequence
  PCSK9 spacer
gtgctcgggtgcttcggcca

SEQ ID NO: 41295 - DNA, 20 bp, Artificial Sequence
  PCSK9 spacer
gcaccaccacgtaggtgcca

SEQ ID NO: 41296 - DNA, 20 bp, Artificial Sequence
  PCSK9 spacer
tcctggcttcctggtgaaga

SEQ ID NO: 41297 - DNA, 20 bp, Artificial Sequence
  PCSK9 spacer
tggcttcctggtgaagatga

SEQ ID NO: 41298 - DNA, 20 bp, Artificial Sequence
  PCSK9 spacer
ccaggaagccaggaagaagg

SEQ ID NO: 41299 - DNA, 20 bp, Artificial Sequence
  PCSK9 spacer
tccttgcatggggccaggat

SEQ ID NO: 41300 - DNA, 20 bp, Artificial Sequence
  PCSK9 spacer
cctctcccctggccctcatg

SEQ ID NO: 41301 - DNA, 20 bp, Artificial Sequence
  PCSK9 spacer
tcatgggcaccgtcagctcc

SEQ ID NO: 41302 - DNA, 20 bp, Artificial Sequence
  PCSK9 spacer
agcagcagcagcagcagcag

SEQ ID NO: 41303 - DNA, 20 bp, Artificial Sequence
  PCSK9 spacer
tcccgcgggcgcccgtgcgc

SEQ ID NO: 41304 - DNA, 20 bp, Artificial Sequence
  PCSK9 spacer
ggacgaggacggcgactacg

SEQ ID NO: 41305 - DNA, 20 bp, Artificial Sequence
  PCSK9 spacer
ggccgtcctcctcggaacgc

SEQ ID NO: 41306 - DNA, 20 bp, Artificial Sequence
  PCSK9 spacer
cctggccgaagcacccgagc

SEQ ID NO: 41307 - DNA, 20 bp, Artificial Sequence
  PCSK9 spacer
cgcagcggtggaaggtggct

SEQ ID NO: 41308 - DNA, 23 bp, Artificial Sequence
  PCSK9 spacer
tgctgctgctgctgctgctgctc

SEQ ID NO: 41309 - DNA, 23 bp, Artificial Sequence
  PCSK9 spacer
ggaaggtggctgtggttccgtgc

SEQ ID NO: 41310 - DNA, 23 bp, Artificial Sequence
  PCSK9 spacer
accttccaccgctgcgccaaggt

SEQ ID NO: 41311 - DNA, 23 bp, Artificial Sequence
  PCSK9 spacer
ccgctgcgccaaggtgcgggtgt

SEQ ID NO: 41312 - DNA, 23 bp, Artificial Sequence
  PCSK9 spacer
cacgtaggtgccaggcaacctcc

SEQ ID NO: 41313 - DNA, 23 bp, Artificial Sequence
  PCSK9 spacer
gcagtgcgctctgactgcgagag

SEQ ID NO: 41314 - DNA, 23 bp, Artificial Sequence
  PCSK9 spacer
cctgcaggcccaggctgcccgcc

SEQ ID NO: 41315 - DNA, 23 bp, Artificial Sequence
  PCSK9 spacer
ggaagaaggccatggaagacatg

SEQ ID NO: 41316 - DNA, 23 bp, Artificial Sequence
  PCSK9 spacer
ttcttcctggcttcctggtgaag

SEQ ID NO: 41317 - DNA, 20 bp, Artificial Sequence
  PCSK9 spacer
caggagctccagtgacagcc

SEQ ID NO: 41318 - DNA, 20 bp, Artificial Sequence
  PCSK9 spacer
agtgacagccccatcccagg

SEQ ID NO: 41319 - DNA, 20 bp, Artificial Sequence
  PCSK9 spacer
ctggagctcctgggaggcct

SEQ ID NO: 41320 - DNA, 20 bp, Artificial Sequence
  B2M spacer
ggcctggaggctatccagcg

SEQ ID NO: 41321 - DNA, 20 bp, Artificial Sequence
  B2M spacer
ggtttactcacgtcatccag

SEQ ID NO: 41322 - DNA, 20 bp, Artificial Sequence
  B2M spacer
tgaattgctatgtgtctggg

SEQ ID NO: 41323 - DNA, 20 bp, Artificial Sequence
  B2M spacer
ctgctggatgacgtgagtaa

SEQ ID NO: 41324 - DNA, 20 bp, Artificial Sequence
  B2M spacer
ggaaatttgactttccattc

SEQ ID NO: 41325 - DNA, 20 bp, Artificial Sequence
  B2M spacer
atgtcggatggatgaaaccc

SEQ ID NO: 41326 - DNA, 20 bp, Artificial Sequence
  B2M spacer
tccatccgacattgaagttg

SEQ ID NO: 41327 - DNA, 20 bp, Artificial Sequence
  B2M spacer
atctcttgtactacactgaa

SEQ ID NO: 41328 - DNA, 20 bp, Artificial Sequence
  B2M spacer
gtgtagtacaagagatagaa

SEQ ID NO: 41329 - DNA, 20 bp, Artificial Sequence
  B2M spacer
cacggcaggcatactcatct

SEQ ID NO: 41330 - DNA, 20 bp, Artificial Sequence
  B2M spacer
tagatcgagacatgtaagca

SEQ ID NO: 41331 - DNA, 20 bp, Artificial Sequence
  B2M spacer
aatttacatactctgcttag

SEQ ID NO: 41332 - DNA, 20 bp, Artificial Sequence
  B2M spacer
aagcagagtatgtaaattgg

SEQ ID NO: 41333 - DNA, 20 bp, Artificial Sequence
  B2M spacer
tgaagctgacagcattcggg

SEQ ID NO: 41334 - DNA, 20 bp, Artificial Sequence
  B2M spacer
ggaatgcccgccagcgcgac

SEQ ID NO: 41335 - DNA, 20 bp, Artificial Sequence
  B2M spacer
ggtttactcacgtcatccag

SEQ ID NO: 41336 - DNA, 20 bp, Artificial Sequence
  B2M spacer
ctctccattcttcagtaagt

SEQ ID NO: 41337 - DNA, 20 bp, Artificial Sequence
  B2M spacer
gacttgtctttcagcaagga

SEQ ID NO: 41338 - DNA, 20 bp, Artificial Sequence
  B2M spacer
cccccactgaaaaagatgag

SEQ ID NO: 41339 - DNA, 20 bp, Artificial Sequence
  B2M spacer
tagatcgagacatgtaagca

SEQ ID NO: 41340 - DNA, 20 bp, Artificial Sequence
  B2M spacer
ccactgtctttttcatagat

SEQ ID NO: 41341 - DNA, 20 bp, Artificial Sequence
  B2M spacer
caaggtcaaaaacttacctc

SEQ ID NO: 41342 - DNA, 20 bp, Artificial Sequence
  B2M spacer
ttgctaacctttttcttttc

SEQ ID NO: 41343 - DNA, 20 bp, Artificial Sequence
  B2M spacer
tttcttttcaggtttgaaga

SEQ ID NO: 41344 - DNA, 20 bp, Artificial Sequence
  B2M spacer
tttcaggtttgaagatgccg

SEQ ID NO: 41345 - DNA, 20 bp, Artificial Sequence
  B2M spacer
ggtttgaagatgccgcattt

SEQ ID NO: 41346 - DNA, 20 bp, Artificial Sequence
  B2M spacer
aacctgaaaagaaaagaaaa

SEQ ID NO: 41347 - DNA, 20 bp, Artificial Sequence
  B2M spacer
tccaatccaaatgcggcatc

SEQ ID NO: 41348 - DNA, 20 bp, Artificial Sequence
  B2M spacer
tggtcaaataaacaaagctg

SEQ ID NO: 41349 - DNA, 20 bp, Artificial Sequence
  B2M spacer
cattttccagattaggaatc

SEQ ID NO: 41350 - DNA, 20 bp, Artificial Sequence
  B2M spacer
ggaatgcccgccagcgcgac

SEQ ID NO: 41351 - DNA, 20 bp, Artificial Sequence
  B2M spacer
tgaagctgacagcattcggg

SEQ ID NO: 41352 - DNA, 20 bp, Artificial Sequence
  B2M spacer
caaggtcaaaaacttacctc

SEQ ID NO: 41353 - DNA, 20 bp, Artificial Sequence
  B2M spacer
tttcttttcaggtttgaaga

SEQ ID NO: 41354 - DNA, 20 bp, Artificial Sequence
  B2M spacer
aggcatagttttatacctga

SEQ ID NO: 41355 - DNA, 20 bp, Artificial Sequence
  B2M spacer
attctctgctggatgacgtg

SEQ ID NO: 41356 - DNA, 20 bp, Artificial Sequence
  B2M spacer
ggccgagatgtctcgctccg

SEQ ID NO: 41357 - DNA, 20 bp, Artificial Sequence
  B2M spacer
atgtttgatgtatctgagca

SEQ ID NO: 41358 - DNA, 20 bp, Artificial Sequence
  B2M spacer
gatacatcaaacatggagac

SEQ ID NO: 41359 - DNA, 20 bp, Artificial Sequence
  B2M spacer
atgatgctgcttacatgtct

SEQ ID NO: 41360 - DNA, 20 bp, Artificial Sequence
  B2M spacer
cgtcatccagcagagaatgg

SEQ ID NO: 41361 - DNA, 20 bp, Artificial Sequence
  B2M spacer
gctggatgacgtgagtaaac

SEQ ID NO: 41362 - DNA, 20 bp, Artificial Sequence
  B2M spacer
aggccagaaagagagagtag

SEQ ID NO: 41363 - DNA, 20 bp, Artificial Sequence
  B2M spacer
actgtctttttcatagatcg

SEQ ID NO: 41364 - DNA, 20 bp, Artificial Sequence
  B2M spacer
aggtcaaaaacttacctcca

SEQ ID NO: 41365 - DNA, 20 bp, Artificial Sequence
  B2M spacer
atgatgctgcttacatgtct

SEQ ID NO: 41366 - DNA, 20 bp, Artificial Sequence
  B2M spacer
acttatattaaacgcgtgcc

SEQ ID NO: 41367 - DNA, 20 bp, Artificial Sequence
  B2M spacer
cggcccgaatgctgtcagct

SEQ ID NO: 41368 - DNA, 20 bp, Artificial Sequence
  B2M spacer
agcgtgagtctctcctaccc

SEQ ID NO: 41369 - DNA, 20 bp, Artificial Sequence
  B2M spacer
ttggagtacctgaggaatat

SEQ ID NO: 41370 - DNA, 20 bp, Artificial Sequence
  B2M spacer
agcagagaatggaaagtcaa

SEQ ID NO: 41371 - DNA, 20 bp, Artificial Sequence
  B2M spacer
atccgacattgaagttgact

SEQ ID NO: 41372 - DNA, 20 bp, Artificial Sequence
  B2M spacer
gacattgaagttgacttact

SEQ ID NO: 41373 - DNA, 20 bp, Artificial Sequence
  B2M spacer
cttgtactacactgaattca

SEQ ID NO: 41374 - DNA, 20 bp, Artificial Sequence
  B2M spacer
ttttcagtgggggtgaattc

SEQ ID NO: 41375 - DNA, 20 bp, Artificial Sequence
  B2M spacer
tgggctgtgacaaagtcaca

SEQ ID NO: 41376 - DNA, 20 bp, Artificial Sequence
  B2M spacer
agacatgtaagcagcatcat

SEQ ID NO: 41377 - DNA, 20 bp, Artificial Sequence
  B2M spacer
tcaaacctgaaaagaaaaga

SEQ ID NO: 41378 - DNA, 20 bp, Artificial Sequence
  B2M spacer
aaatgcggcatcttcaaacc

SEQ ID NO: 41379 - DNA, 20 bp, Artificial Sequence
  B2M spacer
aatccaaatgcggcatcttc

SEQ ID NO: 41380 - DNA, 20 bp, Artificial Sequence
  B2M spacer
gagcaggttgctccacaggt

SEQ ID NO: 41381 - DNA, 20 bp, Artificial Sequence
  B2M spacer
taaaacttgatgtgttatct

SEQ ID NO: 41382 - DNA, 20 bp, Artificial Sequence
  B2M spacer
aacatcaacatcttggtcag

SEQ ID NO: 41383 - DNA, 20 bp, Artificial Sequence
  B2M spacer
cggcccgaatgctgtcagct

SEQ ID NO: 41384 - DNA, 20 bp, Artificial Sequence
  B2M spacer
tgattggctgggcacgcgtt

SEQ ID NO: 41385 - DNA, 20 bp, Artificial Sequence
  B2M spacer
cgctccgtggccttagctgt

SEQ ID NO: 41386 - DNA, 20 bp, Artificial Sequence
  B2M spacer
aataaacaaagctggccatc

SEQ ID NO: 41387 - DNA, 20 bp, Artificial Sequence
  B2M spacer
tataagattcatatttactt

SEQ ID NO: 41388 - DNA, 20 bp, Artificial Sequence
  B2M spacer
gggccgagatgtctcgctcc

SEQ ID NO: 41389 - DNA, 20 bp, Artificial Sequence
  B2M spacer
aatgtcggatggatgaaacc

SEQ ID NO: 41390 - DNA, 20 bp, Artificial Sequence
  B2M spacer
gctgtgctcgcgctactctc

SEQ ID NO: 41391 - DNA, 20 bp, Artificial Sequence
  B2M spacer
ctggcctggaggctatccag

SEQ ID NO: 41392 - DNA, 20 bp, Artificial Sequence
  B2M spacer
ccattctctgctggatgacg

SEQ ID NO: 41393 - DNA, 20 bp, Artificial Sequence
  B2M spacer
ctgaagaatggagagagaat

SEQ ID NO: 41394 - DNA, 20 bp, Artificial Sequence
  B2M spacer
cctccatgatgctgcttaca

SEQ ID NO: 41395 - DNA, 20 bp, Artificial Sequence
  B2M spacer
caatttacatactctgctta

SEQ ID NO: 41396 - DNA, 20 bp, Artificial Sequence
  B2M spacer
cactcaaagcttgttaagat

SEQ ID NO: 41397 - DNA, 20 bp, Artificial Sequence
  B2M spacer
acaagctttgagtgcaagag

SEQ ID NO: 41398 - DNA, 23 bp, Artificial Sequence
  B2M spacer
tcggcccgaatgctgtcagcttc

SEQ ID NO: 41399 - DNA, 23 bp, Artificial Sequence
  B2M spacer
gccacggagcgagacatctcggc

SEQ ID NO: 41400 - DNA, 23 bp, Artificial Sequence
  B2M spacer
ggatagcctccaggccagaaaga

SEQ ID NO: 41401 - DNA, 23 bp, Artificial Sequence
  B2M spacer
ttctggcctggaggctatccagc

SEQ ID NO: 41402 - DNA, 23 bp, Artificial Sequence
  B2M spacer
cgggagggtaggagagactcacg

SEQ ID NO: 41403 - DNA, 23 bp, Artificial Sequence
  B2M spacer
aacctgaatctttggagtacctg

SEQ ID NO: 41404 - DNA, 23 bp, Artificial Sequence
  B2M spacer
tgacgtgagtaaacctgaatctt

SEQ ID NO: 41405 - DNA, 23 bp, Artificial Sequence
  B2M spacer
tctgctggatgacgtgagtaaac

SEQ ID NO: 41406 - DNA, 23 bp, Artificial Sequence
  B2M spacer
aggtttactcacgtcatccagca

SEQ ID NO: 41407 - DNA, 23 bp, Artificial Sequence
  B2M spacer
ctttccattctctgctggatgac

SEQ ID NO: 41408 - DNA, 23 bp, Artificial Sequence
  B2M spacer
gaaatttgactttccattctctg

SEQ ID NO: 41409 - DNA, 23 bp, Artificial Sequence
  B2M spacer
cagagaatggaaagtcaaatttc

SEQ ID NO: 41410 - DNA, 23 bp, Artificial Sequence
  B2M spacer
aaatttcctgaattgctatgtgt

SEQ ID NO: 41411 - DNA, 23 bp, Artificial Sequence
  B2M spacer
cagtaagtcaacttcaatgtcgg

SEQ ID NO: 41412 - DNA, 23 bp, Artificial Sequence
  B2M spacer
ccgacattgaagttgacttactg

SEQ ID NO: 41413 - DNA, 23 bp, Artificial Sequence
  B2M spacer
tcttcagtaagtcaacttcaatg

SEQ ID NO: 41414 - DNA, 23 bp, Artificial Sequence
  B2M spacer
gttgacttactgaagaatggaga

SEQ ID NO: 41415 - DNA, 23 bp, Artificial Sequence
  B2M spacer
ccagtccttgctgaaagacaagt

SEQ ID NO: 41416 - DNA, 23 bp, Artificial Sequence
  B2M spacer
gtctttctatctcttgtactaca

SEQ ID NO: 41417 - DNA, 23 bp, Artificial Sequence
  B2M spacer
tgaattcacccccactgaaaaag

SEQ ID NO: 41418 - DNA, 23 bp, Artificial Sequence
  B2M spacer
catactcatctttttcagtgggg

SEQ ID NO: 41419 - DNA, 23 bp, Artificial Sequence
  B2M spacer
caggcatactcatctttttcagt

SEQ ID NO: 41420 - DNA, 23 bp, Artificial Sequence
  B2M spacer
tgtcacagcccaagatagttaag

SEQ ID NO: 41421 - DNA, 23 bp, Artificial Sequence
  B2M spacer
tttcaggtttgaagatgccgcat

SEQ ID NO: 41422 - DNA, 23 bp, Artificial Sequence
  B2M spacer
ttcaggtttgaagatgccgcatt

SEQ ID NO: 41423 - DNA, 23 bp, Artificial Sequence
  B2M spacer
ggtttgaagatgccgcatttgga

SEQ ID NO: 41424 - DNA, 23 bp, Artificial Sequence
  B2M spacer
tgaagatgccgcatttggattgg

SEQ ID NO: 41425 - DNA, 23 bp, Artificial Sequence
  B2M spacer
taaattttcccccaaattctaag

SEQ ID NO: 41426 - DNA, 23 bp, Artificial Sequence
  B2M spacer
ggaaaatttagaaatataattga

SEQ ID NO: 41427 - DNA, 23 bp, Artificial Sequence
  B2M spacer
ctaagagggagcaaaagtatctg

SEQ ID NO: 41428 - DNA, 23 bp, Artificial Sequence
  B2M spacer
cttcagatacttttgctccctct

SEQ ID NO: 41429 - DNA, 20 bp, Artificial Sequence
  B2M spacer
ggccgagatgtctcgctccg

SEQ ID NO: 41430 - DNA, 20 bp, Artificial Sequence
  B2M spacer
tcaggtactccaaagattca

SEQ ID NO: 41431 - DNA, 20 bp, Artificial Sequence
  B2M spacer
gtgggggtgaattcagtgta

SEQ ID NO: 41432 - DNA, 20 bp, Artificial Sequence
  B2M spacer
tgaagctgacagcattcggg

SEQ ID NO: 41433 - DNA, 20 bp, Artificial Sequence
  B2M spacer
ctgctggatgacgtgagtaa

SEQ ID NO: 41434 - DNA, 20 bp, Artificial Sequence
  B2M spacer
tttcctgacatcatgcttgt

SEQ ID NO: 41435 - DNA, 20 bp, Artificial Sequence
  B2M spacer
ggccgagatgtctcgctccg

SEQ ID NO: 41436 - DNA, 20 bp, Artificial Sequence
  B2M spacer
gtgtagtacaagagatagaa

SEQ ID NO: 41437 - DNA, 20 bp, Artificial Sequence
  B2M spacer
ttctatctcttgtactacac

SEQ ID NO: 41438 - DNA, 20 bp, Artificial Sequence
  B2M spacer
cgctggatagcctccaggcc

SEQ ID NO: 41439 - DNA, 20 bp, Artificial Sequence
  B2M spacer
ggcctggaggctatccagcg

SEQ ID NO: 41440 - DNA, 20 bp, Artificial Sequence
  B2M spacer
cgatattcctcaggtactcc

SEQ ID NO: 41441 - DNA, 20 bp, Artificial Sequence
  B2M spacer
cccccactgaaaaagatgag

SEQ ID NO: 41442 - DNA, 20 bp, Artificial Sequence
  B2M spacer
tgggtaggaacagcagccta

SEQ ID NO: 41443 - DNA, 20 bp, Artificial Sequence
  B2M spacer
aggccagaaagagagagtag

SEQ ID NO: 41444 - DNA, 20 bp, Artificial Sequence
  B2M spacer
tctgctgggcccataacaca

SEQ ID NO: 41445 - DNA, 20 bp, Artificial Sequence
  B2M spacer
tagatcgagacatgtaagca

SEQ ID NO: 41446 - DNA, 20 bp, Artificial Sequence
  B2M spacer
tgagagatctggttgttggt

SEQ ID NO: 41447 - DNA, 20 bp, Artificial Sequence
  B2M spacer
tgaagctgacagcattcggg

SEQ ID NO: 41448 - DNA, 20 bp, Artificial Sequence
  B2M spacer
tctgctgggcccataacaca

SEQ ID NO: 41449 - DNA, 20 bp, Artificial Sequence
  B2M spacer
ttcttttgttcctgtcttcc

SEQ ID NO: 41450 - DNA, 20 bp, Artificial Sequence
  B2M spacer
gtaatcccagcactttgaga

SEQ ID NO: 41451 - DNA, 20 bp, Artificial Sequence
  B2M spacer
tagatcgagacatgtaagca

SEQ ID NO: 41452 - DNA, 20 bp, Artificial Sequence
  B2M spacer
atctgtaatggattttaaat

SEQ ID NO: 41453 - DNA, 20 bp, Artificial Sequence
  B2M spacer
ttaccaaacttgtctaattt

SEQ ID NO: 41454 - DNA, 20 bp, Artificial Sequence
  B2M spacer
tgtcttcctttctgtgaagg

SEQ ID NO: 41455 - DNA, 20 bp, Artificial Sequence
  B2M spacer
ccttcacagaaaggaagaca

SEQ ID NO: 41456 - DNA, 20 bp, Artificial Sequence
  B2M spacer
aatgaataaggcaccagagg

SEQ ID NO: 41457 - DNA, 20 bp, Artificial Sequence
  B2M spacer
tcccaacttggcctcccaaa

SEQ ID NO: 41458 - DNA, 20 bp, Artificial Sequence
  B2M spacer
gatgcaaagagctctcttag

SEQ ID NO: 41459 - DNA, 20 bp, Artificial Sequence
  B2M spacer
ccatgttggccagtctggtc

SEQ ID NO: 41460 - DNA, 20 bp, Artificial Sequence
  B2M spacer
cctcaaactctttgctcctc

SEQ ID NO: 41461 - DNA, 20 bp, Artificial Sequence
  B2M spacer
ggcctggaggctatccagcg

SEQ ID NO: 41462 - DNA, 20 bp, Artificial Sequence
  B2M spacer
cgttcctcatctcccacctc

SEQ ID NO: 41463 - DNA, 20 bp, Artificial Sequence
  B2M spacer
tgtgtctttatttctatgat

SEQ ID NO: 41464 - DNA, 20 bp, Artificial Sequence
  B2M spacer
gttatgcccggacggggcca

SEQ ID NO: 41465 - DNA, 20 bp, Artificial Sequence
  B2M spacer
caaaaaaaaaaaaaaaaatt

SEQ ID NO: 41466 - DNA, 20 bp, Artificial Sequence
  B2M spacer
ttggctcagggcctgctttt

SEQ ID NO: 41467 - DNA, 20 bp, Artificial Sequence
  B2M spacer
cgcgagcacagctaaggcca

SEQ ID NO: 41468 - DNA, 20 bp, Artificial Sequence
  B2M spacer
actcacgctggatagcctcc

SEQ ID NO: 41469 - DNA, 20 bp, Artificial Sequence
  B2M spacer
actctctctttctggcctgg

SEQ ID NO: 41470 - DNA, 20 bp, Artificial Sequence
  B2M spacer
agggtaggagagactcacgc

SEQ ID NO: 41471 - DNA, 20 bp, Artificial Sequence
  B2M spacer
ctcaggtactccaaagattc

SEQ ID NO: 41472 - DNA, 20 bp, Artificial Sequence
  B2M spacer
cgtgagtaaacctgaatctt

SEQ ID NO: 41473 - DNA, 20 bp, Artificial Sequence
  B2M spacer
ttcctgaattgctatgtgtc

SEQ ID NO: 41474 - DNA, 20 bp, Artificial Sequence
  B2M spacer
atactcatctttttcagtgg

SEQ ID NO: 41475 - DNA, 20 bp, Artificial Sequence
  B2M spacer
ttaccccacttaactatctt

SEQ ID NO: 41476 - DNA, 20 bp, Artificial Sequence
  B2M spacer
ggccacggagcgagacatct

SEQ ID NO: 41477 - DNA, 20 bp, Artificial Sequence
  B2M spacer
tataagtggaggcgtcgcgc

SEQ ID NO: 41478 - DNA, 20 bp, Artificial Sequence
  SOD1 spacer
agcagaaggcaagggctggg

SEQ ID NO: 41479 - DNA, 20 bp, Artificial Sequence
  SOD1 spacer
atgttcatgagtttggagat

SEQ ID NO: 41480 - DNA, 20 bp, Artificial Sequence
  SOD1 spacer
tgagtttggagataatacag

SEQ ID NO: 41481 - DNA, 20 bp, Artificial Sequence
  SOD1 spacer
tcgccataactcgctaggcc

SEQ ID NO: 41482 - DNA, 20 bp, Artificial Sequence
  SOD1 spacer
gcacgcacacggccttcgtc

SEQ ID NO: 41483 - DNA, 20 bp, Artificial Sequence
  SOD1 spacer
gctcgaaattgatgatgccc

SEQ ID NO: 41484 - DNA, 19 bp, Artificial Sequence
  SOD1 spacer
atgtgactgctgacaaaga

SEQ ID NO: 41485 - DNA, 20 bp, Artificial Sequence
  SOD1 spacer
gaaggccgtgtgcgtgctga

SEQ ID NO: 41486 - DNA, 21 bp, Artificial Sequence
  SOD1 spacer
gcctgcatggattccatgttc

SEQ ID NO: 41487 - DNA, 23 bp, Artificial Sequence
  SOD1 spacer
aaccaggacctcggcgtggccta

SEQ ID NO: 41488 - DNA, 23 bp, Artificial Sequence
  SOD1 spacer
tgagtttggagataatacagcag

SEQ ID NO: 41489 - DNA, 23 bp, Artificial Sequence
  SOD1 spacer
tatccagaaaacacggtgggcca

SEQ ID NO: 41490 - DNA, 23 bp, Artificial Sequence
  SOD1 spacer
aaaacacggtgggccaaaggatg

SEQ ID NO: 41491 - DNA, 23 bp, Artificial Sequence
  SOD1 spacer
tgatctcactctcaggagaccat

SEQ ID NO: 41492 - DNA, 23 bp, Artificial Sequence
  SOD1 spacer
tgatctcactctcaggagaccat

SEQ ID NO: 41493 - DNA, 23 bp, Artificial Sequence
  SOD1 spacer
agtcgtttggcttgtggtgtaat

SEQ ID NO: 41494 - DNA, 23 bp, Artificial Sequence
  SOD1 spacer
tgttcatgagtttggagataata

SEQ ID NO: 41495 - DNA, 23 bp, Artificial Sequence
  SOD1 spacer
taaaggactgactgaaggcctgc

SEQ ID NO: 41496 - DNA, 20 bp, Artificial Sequence
  SOD1 spacer
ggggacagtgttatcacaag

SEQ ID NO: 41497 - DNA, 20 bp, Artificial Sequence
  SOD1 spacer
ccacaccttcactggtccat

SEQ ID NO: 41498 - DNA, 20 bp, Artificial Sequence
  SOD1 spacer
taaaggaaagtaatggacca

SEQ ID NO: 41499 - DNA, 20 bp, Artificial Sequence
  SOD1 spacer
ctgtgaggggtaaaggtaaa

SEQ ID NO: 41500 - DNA, 20 bp, Artificial Sequence
  SOD1 spacer
ggatagaggattaaagtgag

SEQ ID NO: 41501 - DNA, 20 bp, Artificial Sequence
  SOD1 spacer
tggtgttgcaaagacattac

SEQ ID NO: 41502 - DNA, 20 bp, Artificial Sequence
  SOD1 spacer
tgagtttggagataatacag

SEQ ID NO: 41503 - DNA, 20 bp, Artificial Sequence
  SOD1 spacer
ctggtccattactttccttt

SEQ ID NO: 41504 - DNA, 20 bp, Artificial Sequence
  SOD1 spacer
aaattccaactggttaagga

SEQ ID NO: 41505 - DNA, 20 bp, Artificial Sequence
  SOD1 spacer
ccctggccattgagaatcca

SEQ ID NO: 41506 - DNA, 20 bp, Artificial Sequence
  SOD1 spacer
caggctggagtgcagtggca

SEQ ID NO: 41507 - DNA, 20 bp, Artificial Sequence
  SOD1 spacer
cctgtgcccctctctttcct

SEQ ID NO: 41508 - DNA, 20 bp, Artificial Sequence
  SOD1 spacer
cctcagcatggacctctgaa

SEQ ID NO: 41509 - DNA, 20 bp, Artificial Sequence
  SOD1 spacer
cttctcactgtggctgtacc

SEQ ID NO: 41510 - DNA, 20 bp, Artificial Sequence
  SOD1 spacer
ttattaggcatgttggagac

SEQ ID NO: 41511 - DNA, 20 bp, Artificial Sequence
  SOD1 spacer
gtcataactaatgacatttc

SEQ ID NO: 41512 - DNA, 20 bp, Artificial Sequence
  SOD1 spacer
aatattatgaggttcttaaa

SEQ ID NO: 41513 - DNA, 20 bp, Artificial Sequence
  SOD1 spacer
tggcttcaacacattctttt

SEQ ID NO: 41514 - DNA, 20 bp, Artificial Sequence
  SOD1 spacer
ctttctttttctttctctct

SEQ ID NO: 41515 - DNA, 20 bp, Artificial Sequence
  SOD1 spacer
taagaatttggatcataacc

SEQ ID NO: 41516 - DNA, 20 bp, Artificial Sequence
  SOD1 spacer
ttctttttttaaactcctga

SEQ ID NO: 41517 - DNA, 20 bp, Artificial Sequence
  SOD1 spacer
gaggactgcaacggaaaccc

SEQ ID NO: 41518 - DNA, 20 bp, Artificial Sequence
  SOD1 spacer
ttattaggcatgttggagac

SEQ ID NO: 41519 - DNA, 20 bp, Artificial Sequence
  SOD1 spacer
tatggtatactacttgtaaa

SEQ ID NO: 41520 - DNA, 20 bp, Artificial Sequence
  SOD1 spacer
tcccagagcattagtgtgta

SEQ ID NO: 41521 - DNA, 20 bp, Artificial Sequence
  SOD1 spacer
tgacatttcctgtattagtt

SEQ ID NO: 41522 - DNA, 20 bp, Artificial Sequence
  SOD1 spacer
aggccataaatacttggata

SEQ ID NO: 41523 - DNA, 20 bp, Artificial Sequence
  SOD1 spacer
atagacacatcggccacacc

SEQ ID NO: 41524 - DNA, 20 bp, Artificial Sequence
  SOD1 spacer
accttccctgagcagcttgc

SEQ ID NO: 41525 - DNA, 20 bp, Artificial Sequence
  SOD1 spacer
tccagaactgaaagctagct

SEQ ID NO: 41526 - DNA, 20 bp, Artificial Sequence
  SOD1 spacer
ttattaggcatgttggagac

SEQ ID NO: 41527 - DNA, 20 bp, Artificial Sequence
  SOD1 spacer
ccacaccttcactggtccat

SEQ ID NO: 41528 - DNA, 20 bp, Artificial Sequence
  SOD1 spacer
taaaggaaagtaatggacca

SEQ ID NO: 41529 - DNA, 20 bp, Artificial Sequence
  SOD1 spacer
ctggtccattactttccttt

SEQ ID NO: 41530 - DNA, 20 bp, Artificial Sequence
  SOD1 spacer
atagacacatcggccacacc

SEQ ID NO: 41531 - DNA, 20 bp, Artificial Sequence
  SOD1 spacer
ggatagaggattaaagtgag

SEQ ID NO: 41532 - DNA, 20 bp, Artificial Sequence
  SOD1 spacer
gaggactgcaacggaaaccc

SEQ ID NO: 41533 - DNA, 20 bp, Artificial Sequence
  SOD1 spacer
caggagaccattgcatcatt

SEQ ID NO: 41534 - DNA, 20 bp, Artificial Sequence
  SOD1 spacer
tcttcttataaataggctgt

SEQ ID NO: 41535 - DNA, 20 bp, Artificial Sequence
  SOD1 spacer
tatggtatactacttgtaaa

SEQ ID NO: 41536 - DNA, 20 bp, Artificial Sequence
  SOD1 spacer
tgacatttcctgtattagtt

SEQ ID NO: 41537 - DNA, 20 bp, Artificial Sequence
  SOD1 spacer
ttaataggtctccagatttt

SEQ ID NO: 41538 - DNA, 20 bp, Artificial Sequence
  SOD1 spacer
tcctttggcccaccgtgttt

SEQ ID NO: 41539 - DNA, 20 bp, Artificial Sequence
  SOD1 spacer
tgagtttggagataatacag

SEQ ID NO: 41540 - DNA, 20 bp, Artificial Sequence
  SOD1 spacer
taaaaggatatgcataaaac

SEQ ID NO: 41541 - DNA, 20 bp, Artificial Sequence
  SOD1 spacer
gggataagcaacaccttggt

SEQ ID NO: 41542 - DNA, 20 bp, Artificial Sequence
  SOD1 spacer
gttcccttctcactgtggct

SEQ ID NO: 41543 - DNA, 20 bp, Artificial Sequence
  SOD1 spacer
tgcaaaacaccaagtagaca

SEQ ID NO: 41544 - DNA, 20 bp, Artificial Sequence
  SOD1 spacer
tgattaaataacataaaaag

SEQ ID NO: 41545 - DNA, 20 bp, Artificial Sequence
  SOD1 spacer
tctctcctagcctctggaac

SEQ ID NO: 41546 - DNA, 20 bp, Artificial Sequence
  SOD1 spacer
cttttcttaaaggaaagtaa

SEQ ID NO: 41547 - DNA, 20 bp, Artificial Sequence
  SOD1 spacer
atgcttccccacaccttcac

SEQ ID NO: 41548 - DNA, 20 bp, Artificial Sequence
  SOD1 spacer
ggattccatgttcatgagtt

SEQ ID NO: 41549 - DNA, 20 bp, Artificial Sequence
  SOD1 spacer
gagtttggagataatacagc

SEQ ID NO: 41550 - DNA, 20 bp, Artificial Sequence
  SOD1 spacer
tatctccaaactcatgaaca

SEQ ID NO: 41551 - DNA, 20 bp, Artificial Sequence
  SOD1 spacer
catgaacatggaatccatgc

SEQ ID NO: 41552 - DNA, 20 bp, Artificial Sequence
  SOD1 spacer
tttttcattattaggcatgt

SEQ ID NO: 41553 - DNA, 20 bp, Artificial Sequence
  SOD1 spacer
tattaggcatgttggagact

SEQ ID NO: 41554 - DNA, 20 bp, Artificial Sequence
  SOD1 spacer
tcaggagaccattgcatcat

SEQ ID NO: 41555 - DNA, 20 bp, Artificial Sequence
  SOD1 spacer
gtgtgcggccaatgatgcaa

SEQ ID NO: 41556 - DNA, 23 bp, Artificial Sequence
  SOD1 spacer
tattatctccaaactcatgaaca

SEQ ID NO: 41557 - DNA, 23 bp, Artificial Sequence
  SOD1 spacer
ggccaatgatgcaatggtctcct

SEQ ID NO: 41558 - DNA, 23 bp, Artificial Sequence
  SOD1 spacer
atggtctcctgagagtgagatca

SEQ ID NO: 41559 - DNA, 20 bp, Artificial Sequence
  SOD1 spacer
gcacgcacacggccttcgtc

SEQ ID NO: 41560 - DNA, 20 bp, Artificial Sequence
  SOD1 spacer
gcacgcacacgaccttcgtc

SEQ ID NO: 41561 - DNA, 20 bp, Artificial Sequence
  SOD1 spacer
agaaaacacggtgggccaaa

SEQ ID NO: 41562 - DNA, 20 bp, Artificial Sequence
  SOD1 spacer
tttggcccaccgtgttttct

SEQ ID NO: 41563 - DNA, 20 bp, Artificial Sequence
  SOD1 spacer
tcaatagacacatcggccac

SEQ ID NO: 41564 - DNA, 20 bp, Artificial Sequence
  SOD1 spacer
ttggccgcacactggtggta

SEQ ID NO: 41565 - DNA, 20 bp, Artificial Sequence
  SOD1 spacer
caattacaccacaagccaaa

SEQ ID NO: 41566 - DNA, 20 bp, Artificial Sequence
  SOD1 spacer
cacaccttcactggtccatt

SEQ ID NO: 41567 - DNA, 20 bp, Artificial Sequence
  SOD1 spacer
tgcaggccttcagtcagtcc

SEQ ID NO: 41568 - DNA, 20 bp, Artificial Sequence
  SOD1 spacer
cactttaatcctctatccag

SEQ ID NO: 41569 - DNA, 20 bp, Artificial Sequence
  SOD1 spacer
gagagtgagatcacagaatc

SEQ ID NO: 41570 - DNA, 20 bp, Artificial Sequence
  SOD1 spacer
tgaaaaagcagatgacttgg

SEQ ID NO: 41571 - DNA, 20 bp, Artificial Sequence
  SOD1 spacer
atagacacatcggccacacg

SEQ ID NO: 41572 - DNA, 20 bp, Artificial Sequence
  Rho spacer
aagtggctgcgtaccacacc

SEQ ID NO: 41573 - DNA, 23 bp, Artificial Sequence
  Rho spacer
gacgggtgtggtacgcagccact

SEQ ID NO: 41574 - DNA, 23 bp, Artificial Sequence
  Rho spacer
gacgggtgtggtacgcagcccct

SEQ ID NO: 41575 - DNA, 23 bp, Artificial Sequence
  Rho spacer
tctacgtgcccttctccaatgcg

SEQ ID NO: 41576 - DNA, 23 bp, Artificial Sequence
  Rho spacer
ccatggctcagccaggtagtact

SEQ ID NO: 41577 - DNA, 20 bp, Artificial Sequence
  Rho spacer
agtactgtgggtactcgaag

SEQ ID NO: 41578 - DNA, 20 bp, Artificial Sequence
  Rho spacer
cttctccaatgcgacgggtg

SEQ ID NO: 41579 - DNA, 20 bp, Artificial Sequence
  Rho spacer
gctcagccaggtagtactgt

SEQ ID NO: 41580 - DNA, 20 bp, Artificial Sequence
  Rho spacer
gtgcccttctccaatgcgac

SEQ ID NO: 41581 - DNA, 20 bp, Artificial Sequence
  Rho spacer
cgtgcccttctccaatgcga

SEQ ID NO: 41582 - DNA, 20 bp, Artificial Sequence
  Rho spacer
tgggtgggagcagccgcggg

SEQ ID NO: 41583 - DNA, 20 bp, Artificial Sequence
  Rho spacer
cagcattcttgggtgggagc

SEQ ID NO: 41584 - DNA, 20 bp, Artificial Sequence
  Rho spacer
tgggtgggagcagccacggg

SEQ ID NO: 41585 - DNA, 20 bp, Artificial Sequence
  Rho spacer
tggctgtggcccttgtggct

SEQ ID NO: 41586 - DNA, 20 bp, Artificial Sequence
  Rho spacer
gtgccattcatggctgtggc

SEQ ID NO: 41587 - DNA, 20 bp, Artificial Sequence
  Rho spacer
acgtgcccttctccaatgcg

SEQ ID NO: 41588 - DNA, 20 bp, Artificial Sequence
  Rho spacer
ccaatgcgacgggtgtggta

SEQ ID NO: 41589 - DNA, 20 bp, Artificial Sequence
  Rho spacer
agtacccacagtactacctg

SEQ ID NO: 41590 - DNA, 20 bp, Artificial Sequence
  Rho spacer
ccatgctggccgcctacatg

SEQ ID NO: 41591 - DNA, 20 bp, Artificial Sequence
  Rho spacer
gctgatcgtgctgggcttcc

SEQ ID NO: 41592 - DNA, 20 bp, Artificial Sequence
  Rho spacer
ccatcaacttcctcacgctc

SEQ ID NO: 41593 - DNA, 20 bp, Artificial Sequence
  Rho spacer
tcacgctctacgtcaccgtc

SEQ ID NO: 41594 - DNA, 20 bp, Artificial Sequence
  Rho spacer
tgtgctggacggtgacgtag

SEQ ID NO: 41595 - DNA, 20 bp, Artificial Sequence
  Rho spacer
tggtcctaggtggcttcacc

SEQ ID NO: 41596 - DNA, 20 bp, Artificial Sequence
  Rho spacer
ccagcaccctctacacctct

SEQ ID NO: 41597 - DNA, 20 bp, Artificial Sequence
  Rho spacer
tcttcgggcccacaggatgc

SEQ ID NO: 41598 - DNA, 20 bp, Artificial Sequence
  Rho spacer
ggcccacaggatgcaatttg

SEQ ID NO: 41599 - DNA, 20 bp, Artificial Sequence
  Rho spacer
ttgccaccctgggcggtatg

SEQ ID NO: 41600 - DNA, 20 bp, Artificial Sequence
  Rho spacer
aaggggctccgcaccacgcc

SEQ ID NO: 41601 - DNA, 20 bp, Artificial Sequence
  Rho spacer
aagtggctccgcaccacgcc

SEQ ID NO: 41602 - DNA, 20 bp, Artificial Sequence
  Rho spacer
tggctgtggcccttgtggct

SEQ ID NO: 41603 - DNA, 20 bp, Artificial Sequence
  Rho spacer
tgggtgggagcagccacggg

SEQ ID NO: 41604 - DNA, 18 bp, Artificial Sequence
  Rho spacer
aagtggctccgcaccacg

SEQ ID NO: 41605 - DNA, 19 bp, Artificial Sequence
  Rho spacer
aagtggctccgcaccacgc

SEQ ID NO: 41606 - DNA, 18 bp, Artificial Sequence
  Rho spacer
aaggggctccgcaccacg

SEQ ID NO: 41607 - DNA, 19 bp, Artificial Sequence
  Rho spacer
aaggggctccgcaccacgc

SEQ ID NO: 41608 - DNA, 18 bp, Artificial Sequence
  Rho spacer
aaggggctgcgtaccaca

SEQ ID NO: 41609 - DNA, 19 bp, Artificial Sequence
  Rho spacer
aaggggctgcgtaccacac

SEQ ID NO: 41610 - DNA, 18 bp, Artificial Sequence
  Rho spacer
aagtggctgcgtaccaca

SEQ ID NO: 41611 - DNA, 19 bp, Artificial Sequence
  Rho spacer
aagtggctgcgtaccacac

SEQ ID NO: 41612 - DNA, 20 bp, Artificial Sequence
  TRAC spacer
ggatatctgtgggacaagag

SEQ ID NO: 41613 - DNA, 20 bp, Artificial Sequence
  TRAC spacer
ccgattttgattctcaaaca

SEQ ID NO: 41614 - DNA, 20 bp, Artificial Sequence
  TRAC spacer
caaacaaatgtgtcacaaag

SEQ ID NO: 41615 - DNA, 20 bp, Artificial Sequence
  TRAC spacer
gatgtgtatatcacagacaa

SEQ ID NO: 41616 - DNA, 20 bp, Artificial Sequence
  TRAC spacer
ggaataatgctgttgttgaa

SEQ ID NO: 41617 - DNA, 20 bp, Artificial Sequence
  TRAC spacer
tgtcccacagatatccagaa

SEQ ID NO: 41618 - DNA, 20 bp, Artificial Sequence
  TRAC spacer
gctggtacacggcagggtca

SEQ ID NO: 41619 - DNA, 20 bp, Artificial Sequence
  TRAC spacer
cagctggtacacggcagggt

SEQ ID NO: 41620 - DNA, 20 bp, Artificial Sequence
  TRAC spacer
aaatccagtgacaagtctgt

SEQ ID NO: 41621 - DNA, 20 bp, Artificial Sequence
  TRAC spacer
aggccacagcactgttgctc

SEQ ID NO: 41622 - DNA, 19 bp, Artificial Sequence
  TRAC spacer
cagggttctggatatctgt

SEQ ID NO: 41623 - DNA, 20 bp, Artificial Sequence
  TRAC spacer
agagtctctcagctggtaca

SEQ ID NO: 41624 - DNA, 20 bp, Artificial Sequence
  TRAC spacer
tgtgctagacatgaggtcta

SEQ ID NO: 41625 - DNA, 20 bp, Artificial Sequence
  TRAC spacer
taggcagacagacttgtcac

SEQ ID NO: 41626 - DNA, 20 bp, Artificial Sequence
  TRAC spacer
atttgtttgagaatcaaaat

SEQ ID NO: 41627 - DNA, 20 bp, Artificial Sequence
  TRAC spacer
acacggcagggtcagggttc

SEQ ID NO: 41628 - DNA, 20 bp, Artificial Sequence
  TRAC spacer
agagcaacagtgctgtggcc

SEQ ID NO: 41629 - DNA, 20 bp, Artificial Sequence
  TRAC spacer
aaagtcagatttgttgctcc

SEQ ID NO: 41630 - DNA, 20 bp, Artificial Sequence
  TRAC spacer
tggaataatgctgttgttga

SEQ ID NO: 41631 - DNA, 20 bp, Artificial Sequence
  TRAC spacer
gacaccttcttccccagccc

SEQ ID NO: 41632 - DNA, 20 bp, Artificial Sequence
  TRAC spacer
agaagacaccttcttcccca

SEQ ID NO: 41633 - DNA, 20 bp, Artificial Sequence
  TRAC spacer
tccccagcccaggtaagggc

SEQ ID NO: 41634 - DNA, 20 bp, Artificial Sequence
  TRAC spacer
ccagcccaggtaagggcagc

SEQ ID NO: 41635 - DNA, 23 bp, Artificial Sequence
  TRAC spacer
tggtacacggcagggtcagggtt

SEQ ID NO: 41636 - DNA, 23 bp, Artificial Sequence
  TRAC spacer
tctcagctggtacacggcagggt

SEQ ID NO: 41637 - DNA, 23 bp, Artificial Sequence
  TRAC spacer
agagtctctcagctggtacacgg

SEQ ID NO: 41638 - DNA, 23 bp, Artificial Sequence
  TRAC spacer
tgaataggcagacagacttgtca

SEQ ID NO: 41639 - DNA, 23 bp, Artificial Sequence
  TRAC spacer
cttactttgtgacacatttgttt

SEQ ID NO: 41640 - DNA, 23 bp, Artificial Sequence
  TRAC spacer
ctcaaacaaatgtgtcacaaagt

SEQ ID NO: 41641 - DNA, 23 bp, Artificial Sequence
  TRAC spacer
agttttgtctgtgatatacacat

SEQ ID NO: 41642 - DNA, 23 bp, Artificial Sequence
  TRAC spacer
gggctggggaagaaggtgtcttc

SEQ ID NO: 41643 - DNA, 20 bp, Artificial Sequence
  TRAC spacer
tgtcccacagatatccagaa

SEQ ID NO: 41644 - DNA, 20 bp, Artificial Sequence
  TRAC spacer
gctggtacacggcagggtca

SEQ ID NO: 41645 - DNA, 20 bp, Artificial Sequence
  TRAC spacer
acaacagcattattccagaa

SEQ ID NO: 41646 - DNA, 20 bp, Artificial Sequence
  TRAC spacer
gcaccaaagctgcccttacc

SEQ ID NO: 41647 - DNA, 20 bp, Artificial Sequence
  TRAC spacer
ttttagaaagttcctgtgat

SEQ ID NO: 41648 - DNA, 20 bp, Artificial Sequence
  TRAC spacer
tgtgatgtcaagctggtcga

SEQ ID NO: 41649 - DNA, 20 bp, Artificial Sequence
  TRAC spacer
cgaccagcttgacatcacag

SEQ ID NO: 41650 - DNA, 20 bp, Artificial Sequence
  TRAC spacer
aagcttttctcgaccagctt

SEQ ID NO: 41651 - DNA, 20 bp, Artificial Sequence
  TRAC spacer
aaacctgtcagtgattgggt

SEQ ID NO: 41652 - DNA, 20 bp, Artificial Sequence
  TRAC spacer
gaacccaatcactgacaggt

SEQ ID NO: 41653 - DNA, 20 bp, Artificial Sequence
  TRAC spacer
ggaggaggattcggaaccca

SEQ ID NO: 41654 - DNA, 20 bp, Artificial Sequence
  DMD spacer
gacaacagtttgccgctgcc

SEQ ID NO: 41655 - DNA, 20 bp, Artificial Sequence
  DMD spacer
gcaatcctcaaaaacagatg

SEQ ID NO: 41656 - DNA, 20 bp, Artificial Sequence
  DMD spacer
caatttttcctgtagaatac

SEQ ID NO: 41657 - DNA, 20 bp, Artificial Sequence
  DMD spacer
gtctgacagctgtttgcaga

SEQ ID NO: 41658 - DNA, 20 bp, Artificial Sequence
  DMD spacer
ggcttcccaatttttcctgt

SEQ ID NO: 41659 - DNA, 20 bp, Artificial Sequence
  DMD spacer
ttagaagaatatttcatgag

SEQ ID NO: 41660 - DNA, 20 bp, Artificial Sequence
  DMD spacer
tgcatttgcagagtttagtt

SEQ ID NO: 41661 - DNA, 23 bp, Artificial Sequence
  DMD spacer
tttttggtatcttacaggaactc

SEQ ID NO: 41662 - DNA, 23 bp, Artificial Sequence
  DMD spacer
tttgccgctgcccaatgccatcc

SEQ ID NO: 41663 - DNA, 23 bp, Artificial Sequence
  DMD spacer
agcggcaaactgttgtcagaaca

SEQ ID NO: 41664 - DNA, 23 bp, Artificial Sequence
  DMD spacer
ttctacaggaaaaattgggaagc

SEQ ID NO: 41665 - DNA, 23 bp, Artificial Sequence
  DMD spacer
ttcaggcttcccaatttttcctg

SEQ ID NO: 41666 - DNA, 20 bp, Artificial Sequence
  DMD spacer
tggtatcttacaggaactcc

SEQ ID NO: 41667 - DNA, 20 bp, Artificial Sequence
  DMD spacer
gccgctgcccaatgccatcc

SEQ ID NO: 41668 - DNA, 20 bp, Artificial Sequence
  DMD spacer
caatttttcctgtagaatac

SEQ ID NO: 41669 - DNA, 20 bp, Artificial Sequence
  DMD spacer
cctcctgccaccgcagattc

SEQ ID NO: 41670 - DNA, 20 bp, Artificial Sequence
  DMD spacer
agctgtcagacagaaaaaag

SEQ ID NO: 41671 - DNA, 20 bp, Artificial Sequence
  DMD spacer
tgatccatatgcttttacct

SEQ ID NO: 41672 - DNA, 20 bp, Artificial Sequence
  DMD spacer
tattagatctgtcgccctac

SEQ ID NO: 41673 - DNA, 20 bp, Artificial Sequence
  DMD spacer
atgttctgacaacagtttgc

SEQ ID NO: 41674 - DNA, 20 bp, Artificial Sequence
  DMD spacer
ccagttgcattcaatgttct

SEQ ID NO: 41675 - DNA, 20 bp, Artificial Sequence
  DMD spacer
tccccagttgcattcaatgt

SEQ ID NO: 41676 - DNA, 23 bp, Artificial Sequence
  DMD spacer
ctggcatctgtttttgaggattg

SEQ ID NO: 41677 - DNA, 23 bp, Artificial Sequence
  DMD spacer
gtagaatactggcatctgttttt

SEQ ID NO: 41678 - DNA, 23 bp, Artificial Sequence
  DMD spacer
agaggtagggcgacagatctaat

SEQ ID NO: 41679 - DNA, 20 bp, Artificial Sequence
  DMD spacer
atcttacaggaactccagga

SEQ ID NO: 41680 - DNA, 20 bp, Artificial Sequence
  DMD spacer
caggaactccaggatggcat

SEQ ID NO: 41681 - DNA, 20 bp, Artificial Sequence
  DMD spacer
tccaggatggcattgggcag

SEQ ID NO: 41682 - DNA, 20 bp, Artificial Sequence
  DMD spacer
ttttattctagttgaaagaa

SEQ ID NO: 41683 - DNA, 20 bp, Artificial Sequence
  DMD spacer
gaattctttcaactagaata

SEQ ID NO: 41684 - DNA, 20 bp, Artificial Sequence
  DMD spacer
ttcaactagaataaaaggaa

SEQ ID NO: 41685 - DNA, 20 bp, Artificial Sequence
  DMD spacer
actagaataaaaggaaaaat

SEQ ID NO: 41686 - DNA, 20 bp, Artificial Sequence
  DMD spacer
gagtaggagctaaaatattt

SEQ ID NO: 41687 - DNA, 20 bp, Artificial Sequence
  DMD spacer
tttttgcaaaaacccaaaat

SEQ ID NO: 41688 - DNA, 20 bp, Artificial Sequence
  DMD spacer
tttttcctttttgcaaaaac

SEQ ID NO: 41689 - DNA, 20 bp, Artificial Sequence
  DMD spacer
ttccttcatttaggaagcat

SEQ ID NO: 41690 - DNA, 20 bp, Artificial Sequence
  DMD spacer
ttccagttactctacatctt

SEQ ID NO: 41691 - DNA, 20 bp, Artificial Sequence
  DMD spacer
aacacgaattaggcactccg

SEQ ID NO: 41692 - DNA, 20 bp, Artificial Sequence
  DMD spacer
cctctggtgtccccaggcag

SEQ ID NO: 41693 - DNA, 20 bp, Artificial Sequence
  DMD spacer
aattatctgcaaagatttta

SEQ ID NO: 41694 - DNA, 20 bp, Artificial Sequence
  DMD spacer
tagcaaactttacgcacaga

SEQ ID NO: 41695 - DNA, 20 bp, Artificial Sequence
  DMD spacer
tattgactttattagtcaaa

SEQ ID NO: 41696 - DNA, 20 bp, Artificial Sequence
  DMD spacer
tgataagtaaaattacaaca

SEQ ID NO: 41697 - DNA, 20 bp, Artificial Sequence
  DMD spacer
aagctacctcacatactaat

SEQ ID NO: 41698 - DNA, 20 bp, Artificial Sequence
  DMD spacer
gtaaggacaaagtcaattaa

SEQ ID NO: 41699 - DNA, 20 bp, Artificial Sequence
  DMD spacer
tatcatgggccaggcgtggt

SEQ ID NO: 41700 - DNA, 20 bp, Artificial Sequence
  DMD spacer
gattagggtaagttgaggag

SEQ ID NO: 41701 - DNA, 20 bp, Artificial Sequence
  DMD spacer
atctgcaatagccaattgcc

SEQ ID NO: 41702 - DNA, 20 bp, Artificial Sequence
  DMD spacer
tgtcctttgtagggacatgg

SEQ ID NO: 41703 - DNA, 20 bp, Artificial Sequence
  DMD spacer
ggatccaatccagaatctcc

SEQ ID NO: 41704 - DNA, 20 bp, Artificial Sequence
  DMD spacer
tggagttttcagcaagtaag

SEQ ID NO: 41705 - DNA, 20 bp, Artificial Sequence
  DMD spacer
aatttatattggaaatcttg

SEQ ID NO: 41706 - DNA, 20 bp, Artificial Sequence
  DMD spacer
cgagccttggttttcagctc

SEQ ID NO: 41707 - DNA, 20 bp, Artificial Sequence
  DMD spacer
ttgcagcctgccctgcattc

SEQ ID NO: 41708 - DNA, 20 bp, Artificial Sequence
  DMD spacer
caagtacattttaaagatag

SEQ ID NO: 41709 - DNA, 20 bp, Artificial Sequence
  DMD spacer
agttgaaagaattcagaatc

SEQ ID NO: 41710 - DNA, 20 bp, Artificial Sequence
  DMD spacer
ccagagtaacagtctgagta

SEQ ID NO: 41711 - DNA, 20 bp, Artificial Sequence
  DMD spacer
tggagttcctgtaagatacc

SEQ ID NO: 41712 - DNA, 20 bp, Artificial Sequence
  DMD spacer
tttttgttttgcctttttgg

SEQ ID NO: 41713 - DNA, 20 bp, Artificial Sequence
  DMD spacer
tacaggaactccaggatggc

SEQ ID NO: 41714 - DNA, 20 bp, Artificial Sequence
  DMD spacer
aaaacactagctgccagtca

SEQ ID NO: 41715 - DNA, 20 bp, Artificial Sequence
  DMD spacer
ttcaaaaacactagctgcca

SEQ ID NO: 41716 - DNA, 20 bp, Artificial Sequence
  DMD spacer
ttctttcaaaaacactagct

SEQ ID NO: 41717 - DNA, 20 bp, Artificial Sequence
  DMD spacer
tctttctttcaaaaacacta

SEQ ID NO: 41718 - DNA, 20 bp, Artificial Sequence
  DMD spacer
gactggcagctagtgttttt

SEQ ID NO: 41719 - DNA, 20 bp, Artificial Sequence
  DMD spacer
tcaaacagaaggtatggata

SEQ ID NO: 41720 - DNA, 20 bp, Artificial Sequence
  DMD spacer
aacagaaggtatggataaaa

SEQ ID NO: 41721 - DNA, 20 bp, Artificial Sequence
  DMD spacer
ataccttctgtttgatgatc

SEQ ID NO: 41722 - DNA, 20 bp, Artificial Sequence
  DMD spacer
ttgatactaaccttggtttc

SEQ ID NO: 41723 - DNA, 20 bp, Artificial Sequence
  DMD spacer
cagaaaccaaggttagtatc

SEQ ID NO: 41724 - DNA, 20 bp, Artificial Sequence
  DMD spacer
gacagaaaaaagaggtaggg

SEQ ID NO: 41725 - DNA, 20 bp, Artificial Sequence
  DMD spacer
gtcgccctacctcttttttc

SEQ ID NO: 41726 - DNA, 20 bp, Artificial Sequence
  DMD spacer
ttttttctcataccttctgc

SEQ ID NO: 41727 - DNA, 20 bp, Artificial Sequence
  DMD spacer
tcaagcagaaggtatgagaa

SEQ ID NO: 41728 - DNA, 20 bp, Artificial Sequence
  DMD spacer
cataccttctgcttgatgat

SEQ ID NO: 41729 - DNA, 20 bp, Artificial Sequence
  DMD spacer
agcagaaggtatgagaaaaa

SEQ ID NO: 41730 - DNA, 20 bp, Artificial Sequence
  DMD spacer
atatgcttttacctgcaggc

SEQ ID NO: 41731 - DNA, 20 bp, Artificial Sequence
  DMD spacer
acagatctgtcaaatcgcct

SEQ ID NO: 41732 - DNA, 20 bp, Artificial Sequence
  DMD spacer
gtcaaatcgcctgcaggtaa

SEQ ID NO: 41733 - DNA, 20 bp, Artificial Sequence
  DMD spacer
taaggtaagtctttgatttg

SEQ ID NO: 41734 - DNA, 20 bp, Artificial Sequence
  DMD spacer
aagacttaccttaagatacc

SEQ ID NO: 41735 - DNA, 20 bp, Artificial Sequence
  DMD spacer
caacagatctgtcaaatcgc

SEQ ID NO: 41736 - DNA, 20 bp, Artificial Sequence
  DMD spacer
aatcgcctgcaggtaaaagc

SEQ ID NO: 41737 - DNA, 20 bp, Artificial Sequence
  BCL11A spacer
tggagcctgtgataaaagca

SEQ ID NO: 41738 - DNA, 20 bp, Artificial Sequence
  BCL11A spacer
ctaacagttgcttttatcac

SEQ ID NO: 41739 - DNA, 20 bp, Artificial Sequence
  C9Orf72 spacer
cgtaacctacggtgtcccgc

SEQ ID NO: 41740 - DNA, 20 bp, Artificial Sequence
  C9Orf72 spacer
gtaacctacggtgtcccgct

SEQ ID NO: 41741 - DNA, 20 bp, Artificial Sequence
  PTBP1 spacer
tgctattccggcgcctccac

SEQ ID NO: 41742 - DNA, 20 bp, Artificial Sequence
  PTBP1 spacer
ccccctcccccgactacaca

SEQ ID NO: 41743 - DNA, 20 bp, Artificial Sequence
  PTBP1 spacer
tcaaggccgaaggcggaaac

SEQ ID NO: 41744 - DNA, 20 bp, Artificial Sequence
  PTBP1 spacer
gccttcggccttgaggaata

SEQ ID NO: 41745 - DNA, 20 bp, Artificial Sequence
  PTBP1 spacer
gccttgaggaataaccgcct

SEQ ID NO: 41746 - DNA, 20 bp, Artificial Sequence
  PTBP1 spacer
ctgggtcccgcccccgggcg

SEQ ID NO: 41747 - DNA, 20 bp, Artificial Sequence
  PTBP1 spacer
ggccagtgggaggtgctggc

SEQ ID NO: 41748 - DNA, 20 bp, Artificial Sequence
  PTBP1 spacer
cgccgcctgactcgccacgt

SEQ ID NO: 41749 - DNA, 20 bp, Artificial Sequence
  PTBP1 spacer
ggcgcctccactccgtcccc

SEQ ID NO: 41750 - DNA, 20 bp, Artificial Sequence
  PTBP1 spacer
ctacttgtgtcactaacgga

SEQ ID NO: 41751 - DNA, 20 bp, Artificial Sequence
  PTBP1 spacer
gcatcaggaggttggtgacc

SEQ ID NO: 41752 - DNA, 20 bp, Artificial Sequence
  PTBP1 spacer
ccttcagcatcaggaggttg

SEQ ID NO: 41753 - DNA, 20 bp, Artificial Sequence
  PTBP1 spacer
ccatggtgttggcagcctcc

SEQ ID NO: 41754 - DNA, 20 bp, Artificial Sequence
  PTBP1 spacer
tcgagatgaacacggaggag

SEQ ID NO: 41755 - DNA, 20 bp, Artificial Sequence
  PTBP1 spacer
gctccttgtggttggagaac

SEQ ID NO: 41756 - DNA, 20 bp, Artificial Sequence
  PTBP1 spacer
ccaaccacaaggagctgaag

SEQ ID NO: 41757 - DNA, 20 bp, Artificial Sequence
  PTBP1 spacer
tggtgaaggtgatgatcttc

SEQ ID NO: 41758 - DNA, 20 bp, Artificial Sequence
  PTBP1 spacer
ccaagaacaaccagttccag

SEQ ID NO: 41759 - DNA, 20 bp, Artificial Sequence
  PTBP1 spacer
aagctcaccagcctcaacgt

SEQ ID NO: 41760 - DNA, 20 bp, Artificial Sequence
  PTBP1 spacer
ctcccacctttgccattcct

SEQ ID NO: 41761 - DNA, 20 bp, Artificial Sequence
  PTBP1 spacer
tgcccccgccaggcccggga

SEQ ID NO: 41762 - DNA, 20 bp, Artificial Sequence
  PTBP1 spacer
gtattgctggtcagcaacct

SEQ ID NO: 41763 - DNA, 20 bp, Artificial Sequence
  PTBP1 spacer
tattgaacaggatcttcacg

SEQ ID NO: 41764 - DNA, 20 bp, Artificial Sequence
  PTBP1 spacer
ccttcttattgaacaggatc

SEQ ID NO: 41765 - DNA, 20 bp, Artificial Sequence
  PTBP1 spacer
tgaagcggtgcaggggtgag

SEQ ID NO: 41766 - DNA, 20 bp, Artificial Sequence
  PTBP1 spacer
tggagcccggcttcttgaag

SEQ ID NO: 41767 - DNA, 20 bp, Artificial Sequence
  PTBP1 spacer
ggaagttcttggagcccggc

SEQ ID NO: 41768 - DNA, 20 bp, Artificial Sequence
  PTBP1 spacer
agaagccgggctccaagaac

SEQ ID NO: 41769 - DNA, 20 bp, Artificial Sequence
  PTBP1 spacer
ccaagtccaccatctagggg

SEQ ID NO: 41770 - DNA, 20 bp, Artificial Sequence
  PTBP1 spacer
ctttaaaaaaataaaatctc

SEQ ID NO: 41771 - DNA, 20 bp, Artificial Sequence
  PTBP1 spacer
agttgaccaaatattctaat

SEQ ID NO: 41772 - DNA, 20 bp, Artificial Sequence
  PTBP1 spacer
ttgtggtattaccttgtatg

SEQ ID NO: 41773 - DNA, 20 bp, Artificial Sequence
  PTBP1 spacer
ttgtaattaagtcacaggca

SEQ ID NO: 41774 - DNA, 20 bp, Artificial Sequence
  PTBP1 spacer
agagagcaggcggggccgcc

SEQ ID NO: 41775 - DNA, 20 bp, Artificial Sequence
  PTBP1 spacer
aattttggaccaaagtctca

SEQ ID NO: 41776 - DNA, 20 bp, Artificial Sequence
  PTBP1 spacer
ctgtggacgctgtagaggca

SEQ ID NO: 41777 - DNA, 129 bp, Artificial Sequence; identical to SEQ ID NO: 41054
  CpG-free 5' ITR

SEQ ID NO: 41778 - DNA, 252 bp, Artificial Sequence; identical to SEQ ID NO: 41032
  Promoter variant sequence

SEQ ID NO: 41779 - DNA, 252 bp, Artificial Sequence; identical to SEQ ID NO: 41048
  Promoter variant sequence

SEQ ID NO: 41780 - DNA, 252 bp, Artificial Sequence; identical to SEQ ID NO: 41049
  Promoter variant sequence

SEQ ID NO: 41781 - DNA, 241 bp, Artificial Sequence; identical to SEQ ID NO: 41050
  Promoter variant sequence

SEQ ID NO: 41782 - DNA, 241 bp, Artificial Sequence; identical to SEQ ID NO: 41051
  Promoter variant sequence

SEQ ID NO: 41783 - DNA, 400 bp, Artificial Sequence; identical to SEQ ID NO: 41045
  Promoter variant sequence

SEQ ID NO: 41784 - DNA, 400 bp, Artificial Sequence; identical to SEQ ID NO: 41046
  Promoter variant sequence

SEQ ID NO: 41785 - DNA, 400 bp, Artificial Sequence; identical to SEQ ID NO: 41047
  Promoter variant sequence

SEQ ID NO: 41786 - DNA, 354 bp, Artificial Sequence; identical to SEQ ID NO: 41035
  Promoter variant sequence

SEQ ID NO: 41787 - DNA, 197 bp, Artificial Sequence; identical to SEQ ID NO: 41036
  Promoter variant sequence

SEQ ID NO: 41788 - DNA, 178 bp, Artificial Sequence; identical to SEQ ID NO: 41037
  Promoter variant sequence

SEQ ID NO: 41789 - DNA, 41 bp, Artificial Sequence; identical to SEQ ID NO: 41038
  Promoter variant sequence

SEQ ID NO: 41790 - DNA, 212 bp, Artificial Sequence; identical to SEQ ID NO: 41041
  Promoter variant sequence

SEQ ID NO: 41791 - DNA, 223 bp, Artificial Sequence; identical to SEQ ID NO: 41044
  Promoter variant sequence

SEQ ID NO: 41792 - DNA, 3006 bp, Artificial Sequence; identical to SEQ ID NO: 41052
  CasX variant

SEQ ID NO: 41793 - DNA, 91 bp, Artificial Sequence; identical to SEQ ID NO: 41010
  Pol III promoter

SEQ ID NO: 41794 - DNA, 92 bp, Artificial Sequence; identical to SEQ ID NO: 41011
  Pol III promoter

SEQ ID NO: 41795 - DNA, 92 bp, Artificial Sequence; identical to SEQ ID NO: 41012
  Pol III promoter

SEQ ID NO: 41796 - DNA, 91 bp, Artificial Sequence; identical to SEQ ID NO: 41013
  Pol III promoter

SEQ ID NO: 41797 - DNA, 91 bp, Artificial Sequence; identical to SEQ ID NO: 41014
  Pol III promoter

SEQ ID NO: 41798 - DNA, 92 bp, Artificial Sequence; identical to SEQ ID NO: 41015
  Pol III promoter

SEQ ID NO: 41799 - DNA, 91 bp, Artificial Sequence; identical to SEQ ID NO: 41016
  Pol III promoter

SEQ ID NO: 41800 - DNA, 91 bp, Artificial Sequence; identical to SEQ ID NO: 41017
  Pol III promoter

SEQ ID NO: 41801 - DNA, 91 bp, Artificial Sequence; identical to SEQ ID NO: 41018
  Pol III promoter

SEQ ID NO: 41802 - DNA, 92 bp, Artificial Sequence; identical to SEQ ID NO: 41019
  Pol III promoter

SEQ ID NO: 41803 - DNA, 91 bp, Artificial Sequence; identical to SEQ ID NO: 41020
  Pol III promoter

SEQ ID NO: 41804 - DNA, 94 bp, Artificial Sequence; identical to SEQ ID NO: 41021
  Pol III promoter

SEQ ID NO: 41805 - DNA, 92 bp, Artificial Sequence; identical to SEQ ID NO: 41022
  Pol III promoter

SEQ ID NO: 41806 - DNA, 90 bp, Artificial Sequence; identical to SEQ ID NO: 41023
  Pol III promoter

SEQ ID NO: 41807 - DNA, 94 bp, Artificial Sequence; identical to SEQ ID NO: 41024
  Pol III promoter

SEQ ID NO: 41808 - DNA, 94 bp, Artificial Sequence; identical to SEQ ID NO: 41025
  Pol III promoter

SEQ ID NO: 41809 - DNA, 249 bp, Artificial Sequence; identical to SEQ ID NO: 41026
  Pol III promoter

SEQ ID NO: 41810 - DNA, 249 bp, Artificial Sequence; identical to SEQ ID NO: 41027
  Pol III promoter

SEQ ID NO: 41811 - DNA, 249 bp, Artificial Sequence; identical to SEQ ID NO: 41028
  Pol III promoter

SEQ ID NO: 41812 - DNA, 249 bp, Artificial Sequence; identical to SEQ ID NO: 41029
  Pol III promoter

SEQ ID NO: 41813 - DNA, 241 bp, Artificial Sequence; identical to SEQ ID NO: 41050
  Pol III promoter

SEQ ID NO: 41814 - DNA, 241 bp, Artificial Sequence; identical to SEQ ID NO: 41051
  Pol III promoter

SEQ ID NO: 41815 - DNA, 131 bp, Artificial Sequence; identical to SEQ ID NO: 41055
  CpG-free 3' ITR

SEQ ID NO: 41816 - DNA, 208 bp, Artificial Sequence; identical to SEQ ID NO: 41053
  Poly A signal

SEQ ID NO: 41817 - RNA, 141 nt, Artificial Sequence
  CasX scaffold variant
acuggcgcuuuuaucugauuacuuugagagccaucaccagcgacuaugucguaguggguaaagcugcacuaugggcgcagcgucaaugacgcugacgguacaggccagacaauuauugucugguauagugcagcaucaaag

SEQ ID NO: 41818 - protein, 91 aa, Artificial Sequence; identical to SEQ ID NO: 40988
  NTSB domain

SEQ ID NO: 41819 - protein, 141 aa, Artificial Sequence; identical to SEQ ID NO: 40989
  helical I-II domain

SEQ ID NO: 41820 - protein, 168 aa, Artificial Sequence; identical to SEQ ID NO: 41004
  helical II domain

SEQ ID NO: 41821 - protein, 164 aa, Artificial Sequence; identical to SEQ ID NO: 41005
  RuvC-I domain

SEQ ID NO: 41822 - protein, 56 aa, Artificial Sequence; identical to SEQ ID NO: 40995
  OBD-I domain

SEQ ID NO: 41823 - protein, 146 aa, Artificial Sequence; identical to SEQ ID NO: 41000
  OBD-II domain

SEQ ID NO: 41824 - protein, 44 aa, Artificial Sequence; identical to SEQ ID NO: 40996
  helical I-I domain

SEQ ID NO: 41825 - protein, 110 aa, Artificial Sequence; identical to SEQ ID NO: 41002
  TSL domain

SEQ ID NO: 41826 - protein, 58 aa, Artificial Sequence; identical to SEQ ID NO: 41003
  RuvC-II domain

SEQ ID NO: 41827 - protein, 24 aa, Artificial Sequence
  nuclear localization signal
SRRRKANPTKLSENAKKLAKEVEN

SEQ ID NO: 41828 - protein, 28 aa, Artificial Sequence
  nuclear localization signal
KRTADSQHSTPPKTKRKVEFEPKKKRKV

SEQ ID NO: 41829 - RNA, 46 nt, Artificial Sequence
  triplex
  misc_feature (37)..(39): n is a, c, g, or u
acuggcgcuuuuaucugauuacuuugagagccaucannnaucaaag

SEQ ID NO: 41830 - RNA, 20 nt, Artificial Sequence
  spacer sequence
uucucggcgcugcaccacgu

SEQ ID NO: 41831 - RNA, 20 nt, Artificial Sequence
  spacer sequence
caagaggagaagcaguuugg

SEQ ID NO: 41832 - RNA, 20 nt, Artificial Sequence
  spacer sequence
ggggccugugccaucucucg

SEQ ID NO: 41833 - RNA, 20 nt, Artificial Sequence
  spacer sequence
aggggucuucgagaagaccc

SEQ ID NO: 41834 - RNA, 19 nt, Artificial Sequence
  triplex loop sequence
cuuuaucucauuacuuuga

SEQ ID NO: 41835 - DNA, 31 bp, Artificial Sequence
  pseudoknot sequence with triplex loop sequence
aaaacgcuuuaucucauuacuuugacgtttt

SEQ ID NO: 41836 - RNA, 19 nt, Artificial Sequence
  constraint string
  misc_feature (1)..(19): n is a, c, g, or u
nnnnnnnnnnnnnnnnnnn

SEQ ID NO: 41837 - DNA, 20 bp, Artificial Sequence
  spacer sequence
agagcgtgatattaccctgt

SEQ ID NO: 41838 - DNA, 20 bp, Artificial Sequence
  spacer sequence
ccctttgacgttggagtcca

SEQ ID NO: 41839 - DNA, 20 bp, Artificial Sequence
  spacer sequence
tccccgatatgcaccaccgg

SEQ ID NO: 41840 - DNA, 20 bp, Artificial Sequence
  spacer sequence
aagtggctgcgtaccacacc

SEQ ID NO: 41841 - DNA, 20 bp, Artificial Sequence
  spacer sequence
gtacatccacaaacagacga

SEQ ID NO: 41842 - DNA, 20 bp, Artificial Sequence
  spacer sequence
ccgatatgcaccaccgggta

SEQ ID NO: 41843 - RNA, 31 nt, Artificial Sequence
  Stem IIB loop
ugggcgcagcgucaaugacgcugacgguaca

SEQ ID NO: 41844 - RNA, 66 nt, Artificial Sequence
  Stem II loop
gcacuaugggcgcagcgucaaugacgcugacgguacaggccagacaauuauugucugguauagugc

SEQ ID NO: 41845 - RNA, 167 nt, Artificial Sequence
  Stem II-V loop
caggaagcacuaugggcgcagcgucaaugacgcugacgguacaggccagacaauuauugucugguauagugcagcagcagaacaauuugcugagggcuauugaggcgcaacagcaucuguugcaacucacagucuggggcaucaagcagcuccaggcaagaauccug

SEQ ID NO: 41846 - RNA, 15 nt, Artificial Sequence
  RBE loop
gcugacgguacaggc

SEQ ID NO: 41847 - RNA, 234 nt, Artificial Sequence
  Full-length RRE loop
aggagcuuuguuccuuggguucuugggagcagcaggaagcacuaugggcgcagcgucaaugacgcugacgguacaggccagacaauuauugucugguauagugcagcagcagaacaauuugcugagggcuauugaggcgcaacagcaucuguugcaacucacagucuggggcaucaagcagcuccaggcaagaauccuggcuguggaaagauaccuaaaggaucaacagcuccu
